(19) United States
(12) Patent Application Publication
(10) Pub. No.: US 2011/0214207 A1
(43) Pub. Date: Sep. 1, 2011

(54) Plants Having Enhanced Yield-Related Traits and a Method for Making the Same

(75) Inventors: Valerie Frankard, Waterloo (BE); Andry Andriankaja, Gent (BE); Yves Hatzfeld, Lille (FR); Marieke Louwers, Gent (BE); Steven Vandenabeele, Oudenaarde (BE); Aurine Verkest, Gent (BE); Geert De Jaeger, Evergem (BE); Dirk Inze, Moorsel-Aalst (BE)

(73) Assignee: BASF Plant Science Company GmbH, Ludwigshafen (DE)

(21) Appl. No.: 13/060,881

(22) PCT Filed: Aug. 31, 2009
(86) PCT No.: PCT/EP2009/061226

§ 371 Date: Apr. 27, 2011

Related U.S. Application Data
(60) Provisional application No. 61/190,543, filed on Aug. 29, 2008.

(51) Int. Cl. A01H 1/00; C12N 15/82; C12N 5/10; C12N 15/87; A01H 5/04; A01H 5/00

(52) U.S. Cl. 800/290; 435/468; 435/419; 435/320.1; 800/278; 800/298; 800/320; 800/320.1; 800/320.2; 800/320.3

(57) ABSTRACT

The present invention relates generally to the field of molecular biology and concerns a method for enhancing yield-related traits in plants by modulating expression in a plant of one or more nucleic acid(s) encoding at least two iSYT (inter-actor of SYT-synovial sarcoma translocation-) polypeptides. The present invention also concerns plants having modulated expression of a nucleic acid encoding at least two iSYT polypeptides, which plants have enhanced yield-related traits relative to corresponding wild type plants or other control plants. The invention also provides hitherto unknown nucleic acids encoding at least two iSYT polypeptides, and constructs comprising the same, useful in performing the methods of the invention. The invention also provides constructs useful in the methods of the invention. Furthermore the present invention also relates to an iSYT-based protein complex. It further relates to the use of the complex to promote plant growth, and to a method for stimulating the complex formation, by overexpressing at least two members of the complex.

[0001] The present invention relates generally to the field of molecular biology and concerns a method for enhancing yield-related traits in plants by modulating expression in a plant of one or more nucleic acid(s) encoding at least two iSYT (interactor of SYT-synovial sarcoma translocation-) polypeptides. The present invention also concerns plants having modulated expression of a nucleic acid encoding at least two iSYT polypeptides, which plants have enhanced yield-related traits relative to corresponding wild type plants or other control plants. The invention also provides hitherto unknown nucleic acids encoding at least two iSYT polypeptides, and constructs comprising the same, useful in performing the methods of the invention. The invention also provides constructs useful in the methods of the invention. Furthermore the present invention also relates to an iSYT-based protein complex. It further relates to the use of the complex to promote plant growth, and to a method for stimulating the complex formation, by overexpressing at least two members of the complex.

[0002] The ever-increasing world population and the dwindling supply of arable land available for agriculture fuels research towards increasing the efficiency of agriculture. Conventional means for crop and horticultural improvements utilise selective breeding techniques to identify plants having desirable characteristics. However, such selective breeding techniques have several drawbacks, namely that these techniques are typically labour intensive and result in plants that often contain heterogeneous genetic components that may not always result in the desirable trait being passed on from parent plants. Advances in molecular biology have allowed mankind to modify the germplasm of animals and plants. Genetic engineering of plants entails the isolation and manipulation of genetic material (typically in the form of DNA or RNA) and the subsequent introduction of that genetic material into a plant. Such technology has the capacity to deliver crops or plants having various improved economic, agronomic or horticultural traits.

[0003] The demand for more plant derived products has spectacularly increased. In the near future the challenge for agriculture will be to fulfill the growing demands for feed and food in a sustainable manner. Moreover plants start to play an important role as energy sources. To cope with these major challenges, a profound increase in plant yield will have to be achieved. Biomass production is a multi-factorial system in which a plethora of processes are fed into the activity of meristems that give rise to new cells, tissues, and organs. Although a considerable amount of research on yield performance is being performed little is known about the molecular networks underpinning yield (Van Camp, 2005). Many genes have been described in Arabidopsis thaliana that, when mutated or ectopically expressed, result in the formation of larger structures, such as leaves or roots. These so-called “intrinsic yield genes” are involved in many different processes whose interrelationship is mostly unknown.

[0004] A trait of particular economic interest is increased yield. Yield is normally defined as the measurable produce of economic value from a crop. This may be defined in terms of quantity and/or quality. Yield is directly dependent on several factors, for example, the number and size of the organs, plant architecture (for example, the number of branches), seed production, leaf senescence and more. Root development, nutrient uptake, stress tolerance and early vigour may also be important factors in determining yield. Optimizing the abovementioned factors may therefore contribute to increasing crop yield.

[0005] Seed yield is a particularly important trait, since the seeds of many plants are important for human and animal nutrition. Crops such as corn, rice, wheat, canola and soybean account for over half the total human caloric intake, whether through direct consumption of the seeds themselves or through consumption of meat products raised on processed seeds. They are also a source of sugars, oils and many kinds of metabolites used in industrial processes. Seeds contain an embryo (the source of new shoots and roots) and an endosperm (the source of nutrients for embryo growth during germination and during early growth of seedlings). The development of a seed involves many genes, and requires the transfer of metabolites from the roots, leaves and stems into the growing seed. The endosperm, in particular, assimilates the metabolic precursors of carbohydrates, oils and proteins and synthesizes them into storage macromolecules to fill out the grain.

[0006] Another important trait for many crops is early vigour. Improving early vigour is an important objective of modern rice breeding programs in both temperate and tropical rice cultivars. Long roots are important for proper soil anchorage in water-seeded rice. Where rice is sown directly into flooded fields, and where plants must emerge rapidly through water, longer shoots are associated with vigour. Where drill-seeding is practiced, longer mesocotyls and coleoptiles are important for good seedling emergence. The ability to engineer early vigour into plants would be of great importance in agriculture. For example, poor early vigour has been a limitation to the introduction of maize (Zea mays L.) hybrids based on Corn Belt germplasm in the European Atlantic.

[0007] A further important trait is that of improved abiotic stress tolerance. Abiotic stress is a primary cause of crop loss worldwide, reducing average yields for most major crop plants by more than 50% (Wang et al., Planta 218, 1-14, 2003). Abiotic stresses may be caused by drought, salinity, extremes of temperature, chemical toxicity and oxidative stress. The ability to improve plant tolerance to abiotic stress would be of great economic advantage to farmers worldwide and would allow for the cultivation of crops during adverse conditions and in territories where cultivation of crops may not otherwise be possible.

[0008] Crop yield may therefore be increased by optimising one of the above-mentioned factors. Depending on the end use, the modification of certain yield traits may be favoured over others. For example for applications such as forage or wood production, or bio-fuel resource, an increase in the vegetative parts of a plant may be desirable, and for applications such as flour, starch or oil production, an increase in seed parameters may be particularly desirable. Even amongst the seed parameters, some may be favoured over others, depending on the application. Various mechanisms may contribute to increasing seed yield, whether that is in the form of increased seed size or increased seed number.

[0009] One approach to increasing yield (seed yield and/or biomass) in plants may be through modification of the inherent growth mechanisms of a plant, such as the cell cycle or various signalling pathways involved in plant growth or in defense mechanisms.

[0010] It has now been found that various yield-related traits may be enhanced in plants by modulating expression in a plant of one or more nucleic acid(s) encoding at least two iSYT polypeptides, selected from the group consisting of any of the polypeptides of Table A, homologues thereof, and fusions of the same.

### BACKGROUND

[0011] One of the abovementioned “intrinsic yield genes”, AN3 (also known as GIF1 and herein also refer to as SYT—synovial sarcoma translocation polypeptide), was identified in search of GRF (growth regulating factor) interactors (Kim and Kende, 2004) and by analysis of narrow-leaf Arabidopsis mutants (Horiguchi et al., 2005). SYT is a homolog of the human SYT (synovial sarcoma translocation) protein and is encoded by a small gene family in the Arabidopsis genome. SYT is a transcription co-activator whose biological function, despite the implication of its chromosomal translocation in tumorigenesis, is still unclear (Clark et al., 1994; de Bruijn et al., 1996). Using the yeast GAL4 system, SYT was shown to possess transactivation activity (Kim and Kende, 2004). This together with yeast two-hybrid and in vitro binding assays demonstrating interaction of SYT with several GRFs (Kim and Kende, 2004; Horiguchi et al., 2005), suggests a role of SYT as transcription co-activator of GRFs. GRF (growth regulating factor) genes occur in the genomes of all seed plants thus far examined and encode putative transcription factors that play a regulatory role in growth and development of leaves (Kim et al., 2003). In support of a GRF and SYT transcription activator and co-activator complex, grf and SYT mutants display similar phenotypes, and combinations of grf and SYT mutations showed a cooperative effect (Kim and Kende, 2004). The SYT mutant narrow-leaf phenotype is shown to result of a reduction in cell numbers. Moreover, ectopic expression of SYT resulted in transgenic plants with larger leaves consisting of more cells, indicating that SYT controls both cell number and organ size (Horiguchi et al., 2005). Although the function of SYT in plant growth regulation is not known, these results show that SYT fulfills the requirements of an “intrinsic yield gene”.

[0012] In our ambition to decipher the molecular network underpinning yield enhancement mechanism a genome-wide protein centred approach was undertaken to study SYT interacting proteins in Arabidopsis thaliana cell suspension cultures. The tandem affinity purification (TAP) technology combined with mass spectrometry (MS) based protein identification resulted in the isolation and identification of SYT interacting proteins that may function in the regulation of plant growth (iSYT). Surprisingly, we isolated several proteins belonging to multiprotein complexes. Moreover, many interactors were previously completely uncharacterized. Reports on few of the SYT interactors show that they are implicated in several developmental processes (Wagner & Meyerowitz, 2002; Meagher et al., 2005; Sarnowski et al., 2005; Hurtado et al., 2006; Kwon et al., 2006) but so far none of the identified (iSYT genes have been associated with stimulation of plant growth. Further surprising no specific combination of iSYT polypeptides useful to enhance yield related traits has previously been described.

### SUMMARY

[0013] Surprisingly, it has now been found that modulating expression in a plant of one or more nucleic acid(s) encoding at least two iSYT polypeptides wherein said iSYT polypeptide is selected from the group consisting of any of the polypeptides of Table A, homologues thereof, and fusions of the same, promotes plant growth and gives plants having enhanced yield-related traits relative to control plants,

[0014] According one embodiment, there is provided a method for enhancing yield-related traits in plants relative to control plants, comprising modulating expression in a plant of one or more nucleic acid(s) encoding at least two iSYT polypeptides wherein said iSYT polypeptide is selected from the group consisting of any of the polypeptides of Table A, homologues thereof, and fusions of the same.

### DEFINITIONS

### Polypeptide(s)/Protein(s)

[0015] The terms “polypeptide” and “protein” are used interchangeably herein and refer to amino acids in a polymeric form of any length, linked together by peptide bonds.

### Polynucleotide(s)/Nucleic Acid(s)/Nucleic Acid Sequence(s)/Nucleotide Sequence(s)

[0016] The terms “polynucleotide(s)”, “nucleic acid sequence(s)”, “nucleotide sequence(s)”, “nucleic acid(s)”, “nucleic acid molecule” are used interchangeably herein and refer to nucleotides, either ribonucleotides or deoxyribonucleotides or a combination of both, in a polymeric unbranched form of any length.

### Recombinant DNA

[0017] “Recombinant DNA” means a DNA molecule that is made by combination of two otherwise separated segments of DNA, e.g., by chemical synthesis or by the manipulation of isolated segments of nucleic acids by genetic engineering techniques. Recombinant DNA can include exogenous DNA or simply a manipulated native DNA. Recombinant DNA for expressing a protein in a plant is typically provided as an expression cassette which has a promoter that is active in plant cells operably linked to DNA encoding a protein of interest.

### Homologue(s)

[0018] “Homologues” of a protein encompass peptides, oligopeptides, polypeptides, proteins and enzymes having amino acid substitutions, deletions and/or insertions relative to the unmodified protein in question and having similar biological and functional activity as the unmodified protein from which they are derived.

[0019] A deletion refers to removal of one or more amino acids from a protein.

[0020] An insertion refers to one or more amino acid residues being introduced into a predetermined site in a protein. Insertions may comprise N-terminal and/or C-terminal fusions as well as intra-sequence insertions of single or multiple amino acids. Generally, insertions within the amino acid sequence will be smaller than N- or C-terminal fusions, of the order of about 1 to 10 residues. Examples of N- or C-terminal fusion proteins or peptides include the binding domain or activation domain of a transcriptional activator as used in the yeast two-hybrid system, phage coat proteins, (histidine)-6-tag, glutathione S-transferase-tag, protein A, maltose-binding protein, dihydrofolate reductase, Tag·100 epitope, c-myc epitope, FLAG®-epitope, lacZ, CMP (calmodulin-binding peptide), HA epitope, protein C epitope and VSV epitope.

[0021] A substitution refers to replacement of amino acids of the protein with other amino acids having similar properties (such as similar hydrophobicity, hydrophilicity, antigenicity, propensity to form or break α-helical structures or β-sheet structures). Amino acid substitutions are typically of single residues, but may be clustered depending upon functional constraints placed upon the polypeptide; insertions will usually be of the order of about 1 to 10 amino acid residues. The amino acid substitutions are preferably conservative amino acid substitutions. Conservative substitution tables are well known in the art (see for example Creighton (1984) Proteins. W.H. Freeman and Company (Eds) and Table 1 below).

TABLE 1
Examples of conserved amino acid substitutions

| Residue | Conservative Substitutions |
|---|---|
| Ala | Ser |
| Arg | Lys |
| Asn | Gln; His |
| Asp | Glu |
| Gln | Asn |
| Cys | Ser |
| Glu | Asp |
| Gly | Pro |
| His | Asn; Gln |
| Ile | Leu, Val |
| Leu | Ile; Val |
| Lys | Arg; Gln |
| Met | Leu; Ile |
| Phe | Met; Leu; Tyr |
| Ser | Thr; Gly |
| Thr | Ser; Val |
| Trp | Tyr |
| Tyr | Trp; Phe |
| Val | Ile; Leu |

[0022] Amino acid substitutions, deletions and/or insertions may readily be made using peptide synthetic techniques well known in the art, such as solid phase peptide synthesis and the like, or by recombinant DNA manipulation. Methods for the manipulation of DNA sequences to produce substitution, insertion or deletion variants of a protein are well known in the art. For example, techniques for making substitution mutations at predetermined sites in DNA are well known to those skilled in the art and include M13 mutagenesis, T7-Gen in vitro mutagenesis (USB, Cleveland, Ohio), QuickChange Site Directed mutagenesis (Stratagene, San Diego, Calif.), PCR-mediated site-directed mutagenesis or other site-directed mutagenesis protocols.

### Derivatives

[0023] “Derivatives” include peptides, oligopeptides, polypeptides which may, compared to the amino acid sequence of the naturally-occurring form of the protein, such as the protein of interest, comprise substitutions of amino acids with non-naturally occurring amino acid residues, or additions of non-naturally occurring amino acid residues. “Derivatives” of a protein also encompass peptides, oligopeptides, polypeptides which comprise naturally occurring altered (glycosylated, acylated, prenylated, phosphorylated, myristoylated, sulphated etc.) or non-naturally altered amino acid residues compared to the amino acid sequence of a naturally-occurring form of the polypeptide. A derivative may also comprise one or more non-amino acid substituents or additions compared to the amino acid sequence from which it is derived, for example a reporter molecule or other ligand, covalently or non-covalently bound to the amino acid sequence, such as a reporter molecule which is bound to facilitate its detection, and non-naturally occurring amino acid residues relative to the amino acid sequence of a naturally-occurring protein. Furthermore, “derivatives” also include fusions of the naturally-occurring form of the protein with tagging peptides such as FLAG, HIS6 or thioredoxin (for a review of tagging peptides, see Terpe, Appl. Microbiol. Biotechnol. 60, 523-533, 2003).

### Orthologue(s)/Paralogue(s)

[0024] Orthologues and paralogues encompass evolutionary concepts used to describe the ancestral relationships of genes. Paralogues are genes within the same species that have originated through duplication of an ancestral gene; orthologues are genes from different organisms that have originated through speciation, and are also derived from a common ancestral gene.

### Domain, Motif/Consensus Sequence/Signature

[0025] The term “domain” refers to a set of amino acids conserved at specific positions along an alignment of sequences of evolutionarily related proteins. While amino acids at other positions can vary between homologues, amino acids that are highly conserved at specific positions indicate amino acids that are likely essential in the structure, stability or function of a protein. Identified by their high degree of conservation in aligned sequences of a family of protein homologues, they can be used as identifiers to determine if any polypeptide in question belongs to a previously identified polypeptide family.

[0026] The term “motif” or “consensus sequence” or “signature” refers to a short conserved region in the sequence of evolutionarily related proteins. Motifs are frequently highly conserved parts of domains, but may also include only part of the domain, or be located outside of conserved domain (if all of the amino acids of the motif fall outside of a defined domain).

[0027] Specialist databases exist for the identification of domains, for example, SMART (Schultz et al. (1998) Proc. Natl. Acad. Sci. USA 95, 5857-5864; Letunic et al. (2002) Nucleic Acids Res 30, 242-244), InterPro (Mulder et al., (2003) Nucl. Acids. Res. 31, 315-318), Prosite (Bucher and Bairoch (1994), A generalized profile syntax for biomolecular sequences motifs and its function in automatic sequence interpretation. (In) ISMB-94; Proceedings 2nd International Conference on Intelligent Systems for Molecular Biology. Altman R., Brutlag D., Karp P., Lathrop R., Searls D., Eds., pp 53-61, AAAI Press, Menlo Park; Hulo et al., Nucl. Acids. Res. 32:D134-D137, (2004)), or Pfam (Bateman et al., Nucleic Acids Research 30(1): 276-280 (2002)). A set of tools for in silico analysis of protein sequences is available on the ExPASy proteomics server (Swiss Institute of Bioinformatics (Gasteiger et al., ExPASy: the proteomics server for in-depth protein knowledge and analysis, Nucleic Acids Res. 31:3784-3788 (2003)). Domains or motifs may also be identified using routine techniques, such as by sequence alignment.

[0028] Methods for the alignment of sequences for comparison are well known in the art, such methods include GAP, BESTFIT, BLAST, FASTA and TFASTA. GAP uses the algorithm of Needleman and Wunsch ((1970) J Mol Biol 48: 443-453) to find the global (i.e. spanning the complete sequences) alignment of two sequences that maximizes the number of matches and minimizes the number of gaps. The BLAST algorithm (Altschul et al. (1990) J Mol Biol 215: 403-10) calculates percent sequence identity and performs a statistical analysis of the similarity between the two sequences. The software for performing BLAST analysis is publicly available through the National Centre for Biotechnology Information (NCBI). Homologues may readily be identified using, for example, the ClustalW multiple sequence alignment algorithm (version 1.83), with the default pairwise alignment parameters, and a scoring method in percentage. Global percentages of similarity and identity may also be determined using one of the methods available in the MatGAT software package (Campanella et al., BMC Bioinformatics. 2003 Jul. 10; 4:29. MatGAT: an application that generates similarity/identity matrices using protein or DNA sequences.). Minor manual editing may be performed to optimise alignment between conserved motifs, as would be apparent to a person skilled in the art. Furthermore, instead of using full-length sequences for the identification of homologues, specific domains may also be used. The sequence identity values may be determined over the entire nucleic acid or amino acid sequence or over selected domains or conserved motif(s), using the programs mentioned above using the default parameters. For local alignments, the Smith-Waterman algorithm is particularly useful (Smith T F, Waterman M S (1981) J. Mol. Biol. 147(1); 195-7).

### Reciprocal BLAST

[0029] Typically, this involves a first BLAST involving BLASTing a query sequence (for example using any of the sequences listed in Table A of the Examples section) against any sequence database, such as the publicly available NCBI database. BLASTN or TBLASTX (using standard default values) are generally used when starting from a nucleotide sequence, and BLASTP or TBLASTN (using standard default values) when starting from a protein sequence. The BLAST results may optionally be filtered. The full-length sequences of either the filtered results or non-filtered results are then BLASTed back (second BLAST) against sequences from the organism from which the query sequence is derived. The results of the first and second BLASTs are then compared. A paralogue is identified if a high-ranking hit from the first blast is from the same species as from which the query sequence is derived, a BLAST back then ideally results in the query sequence amongst the highest hits; an orthologue is identified if a high-ranking hit in the first BLAST is not from the same species as from which the query sequence is derived, and preferably results upon BLAST back in the query sequence being among the highest hits.

[0030] High-ranking hits are those having a low E-value. The lower the E-value, the more significant the score (or in other words the lower the chance that the hit was found by chance). Computation of the E-value is well known in the art. In addition to E-values, comparisons are also scored by percentage identity. Percentage identity refers to the number of identical nucleotides (or amino acids) between the two compared nucleic acid (or polypeptide) sequences over a particular length. In the case of large families, ClustalW may be used, followed by a neighbour joining tree, to help visualize clustering of related genes and to identify orthologues and paralogues.

### Hybridisation

[0031] The term “hybridisation” as defined herein is a process wherein substantially homologous complementary nucleotide sequences anneal to each other. The hybridisation process can occur entirely in solution, i.e. both complementary nucleic acids are in solution. The hybridisation process can also occur with one of the complementary nucleic acids immobilised to a matrix such as magnetic beads, Sepharose beads or any other resin. The hybridisation process can furthermore occur with one of the complementary nucleic acids immobilised to a solid support such as a nitro-cellulose or nylon membrane or immobilised by e.g. photolithography to, for example, a siliceous glass support (the latter known as nucleic acid arrays or microarrays or as nucleic acid chips). In order to allow hybridisation to occur, the nucleic acid molecules are generally thermally or chemically denatured to melt a double strand into two single strands and/or to remove hairpins or other secondary structures from single stranded nucleic acids.

[0032] The term “stringency” refers to the conditions under which a hybridisation takes place. The stringency of hybridisation is influenced by conditions such as temperature, salt concentration, ionic strength and hybridisation buffer composition. Generally, low stringency conditions are selected to be about 30° C. lower than the thermal melting point (Tₘ) for the specific sequence at a defined ionic strength and pH. Medium stringency conditions are when the temperature is 20° C. below Tₘ, and high stringency conditions are when the temperature is 10° C. below Tₘ. High stringency hybridisation conditions are typically used for isolating hybridising sequences that have high sequence similarity to the target nucleic acid sequence. However, nucleic acids may deviate in sequence and still encode a substantially identical polypeptide, due to the degeneracy of the genetic code. Therefore medium stringency hybridisation conditions may sometimes be needed to identify such nucleic acid molecules.

[0033] The Tm is the temperature under defined ionic strength and pH, at which 50% of the target sequence hybridises to a perfectly matched probe. The Tₘ is dependent upon the solution conditions and the base composition and length of the probe. For example, longer sequences hybridise specifically at higher temperatures. The maximum rate of hybridisation is obtained from about 16° C. up to 32° C. below Tₘ. The presence of monovalent cations in the hybridisation solution reduce the electrostatic repulsion between the two nucleic acid strands thereby promoting hybrid formation; this effect is visible for sodium concentrations of up to 0.4M (for higher concentrations, this effect may be ignored). Formamide reduces the melting temperature of DNA-DNA and DNA-RNA duplexes with 0.6 to 0.7° C. for each percent formamide, and addition of 50% formamide allows hybridisation to be performed at 30 to 45° C., though the rate of hybridisation will be lowered. Base pair mismatches reduce the hybridisation rate and the thermal stability of the duplexes. On average and for large probes, the Tm decreases about 1° C. per % base mismatch. The Tm may be calculated using the following equations, depending on the types of hybrids:

1) DNA-DNA hybrids (Meinkoth and Wahl, Anal. Biochem., 138: 267-284, 1984):

Tₘ=81.5° C.+16.6×log₁₀[Na]^{a}+0.41×%[G/C^{b}]−500×[L^{c}]⁻¹−0.61×% formamide

2) DNA-RNA or RNA-RNA hybrids:

Tₘ=79.8+18.5(log₁₀[Na⁺]a)+0.58(% G/C^{b})+11.8(% G/C^{b})²−820/L^{c}

3) oligo-DNA or oligo-RNAs hybrids:
[0034] For <20 nucleotides: Tₘ=2 (Iₙ)
[0035] For 20-35 nucleotides: Tₘ=22+1.46 (Iₙ)
   ^{a} or for other monovalent cation, but only accurate in the 0.01-0.4 M range.
   ^{b} only accurate for % GC in the 30% to 75% range.
   ^{c} L=length of duplex in base pairs.
   ^{d} oligo, oligonucleotide; Iₙ, =effective length of primer=2×(no. of G/C)+(no. of A/T).

[0036] Non-specific binding may be controlled using any one of a number of known techniques such as, for example, blocking the membrane with protein containing solutions, additions of heterologous RNA, DNA, and SDS to the hybridisation buffer, and treatment with Rnase. For non-homologous probes, a series of hybridizations may be performed by varying one of (i) progressively lowering the annealing temperature (for example from 68° C. to 42° C.) or (ii) progressively lowering the formamide concentration (for example from 50% to 0%). The skilled artisan is aware of various parameters which may be altered during hybridisation and which will either maintain or change the stringency conditions.

[0037] Besides the hybridisation conditions, specificity of hybridisation typically also depends on the function of post-hybridisation washes. To remove background resulting from non-specific hybridisation, samples are washed with dilute salt solutions. Critical factors of such washes include the ionic strength and temperature of the final wash solution: the lower the salt concentration and the higher the wash temperature, the higher the stringency of the wash. Wash conditions are typically performed at or below hybridisation stringency. A positive hybridisation gives a signal that is at least twice of that of the background. Generally, suitable stringent conditions for nucleic acid hybridisation assays or gene amplification detection procedures are as set forth above. More or less stringent conditions may also be selected. The skilled artisan is aware of various parameters which may be altered during washing and which will either maintain or change the stringency conditions.

[0038] For example, typical high stringency hybridisation conditions for DNA hybrids longer than 50 nucleotides encompass hybridisation at 65° C. in 1×SSC or at 42° C. in 1×SSC and 50% formamide, followed by washing at 65° C. in 0.3×SSC. Examples of medium stringency hybridisation conditions for DNA hybrids longer than 50 nucleotides encompass hybridisation at 50° C. in 4×SSC or at 40° C. in 6×SSC and 50% formamide, followed by washing at 50° C. in 2×SSC. The length of the hybrid is the anticipated length for the hybridising nucleic acid. When nucleic acids of known sequence are hybridised, the hybrid length may be determined by aligning the sequences and identifying the conserved regions described herein. 1×SSC is 0.15M NaCl and 15 mM sodium citrate; the hybridisation solution and wash solutions may additionally include 5×Denhardt's reagent, 0.5-1.0% SDS, 100 μg/ml denatured, fragmented salmon sperm DNA, 0.5% sodium pyrophosphate.

[0039] For the purposes of defining the level of stringency, reference can be made to Sambrook et al. (2001) Molecular Cloning: a laboratory manual, 3rd Edition, Cold Spring Harbor Laboratory Press, CSH, New York or to Current Protocols in Molecular Biology, John Wiley & Sons, N.Y. (1989 and yearly updates).

### Splice Variant

[0040] The term “splice variant” as used herein encompasses variants of a nucleic acid sequence in which selected introns and/or exons have been excised, replaced, displaced or added, or in which introns have been shortened or lengthened. Such variants will be ones in which the biological activity of the protein is substantially retained; this may be achieved by selectively retaining functional segments of the protein. Such splice variants may be found in nature or may be manmade. Methods for predicting and isolating such splice variants are well known in the art (see for example Foissac and Schiex (2005) BMC Bioinformatics 6: 25).

### Allelic Variant

[0041] Alleles or allelic variants are alternative forms of a given gene, located at the same chromosomal position. Allelic variants encompass Single Nucleotide Polymorphisms (SNPs), as well as Small Insertion/Deletion Polymorphisms (INDELs). The size of INDELs is usually less than 100 bp. SNPs and INDELs form the largest set of sequence variants in naturally occurring polymorphic strains of most organisms.

### Endogenous Gene

[0042] Reference herein to an “endogenous” gene not only refers to the gene in question as found in a plant in its natural form (i.e., without there being any human intervention), but also refers to that same gene (or a substantially homologous nucleic acid/gene) in an isolated form subsequently (re)introduced into a plant (a transgene). For example, a transgenic plant containing such a transgene may encounter a substantial reduction of the transgene expression and/or substantial reduction of expression of the endogenous gene. The isolated gene may be isolated from an organism or may be manmade, for example by chemical synthesis.

### Gene Shuffling/Directed Evolution

[0043] Gene shuffling or directed evolution consists of iterations of DNA shuffling followed by appropriate screening and/or selection to generate variants of nucleic acids or portions thereof encoding proteins having a modified biological activity (Castle et al., (2004) Science 304(5674): 1151-4; U.S. Pat. Nos. 5,811,238 and 6,395,547).

### Construct

[0044] Additional regulatory elements may include transcriptional as well as translational enhancers. Those skilled in the art will be aware of terminator and enhancer sequences that may be suitable for use in performing the invention. An intron sequence may also be added to the 5′ untranslated region (UTR) or in the coding sequence to increase the amount of the mature message that accumulates in the cytosol, as described in the definitions section. Other control sequences (besides promoter, enhancer, silencer, intron sequences, 3′UTR and/or 5′UTR regions) may be protein and/or RNA stabilizing elements. Such sequences would be known or may readily be obtained by a person skilled in the art.

[0045] The genetic constructs of the invention may further include an origin of replication sequence that is required for maintenance and/or replication in a specific cell type. One example is when a genetic construct is required to be maintained in a bacterial cell as an episomal genetic element (e.g. plasmid or cosmid molecule). Preferred origins of replication include, but are not limited to, the f1-ori and colE1.

[0046] For the detection of the successful transfer of the nucleic acid sequences as used in the methods of the invention and/or selection of transgenic plants comprising these nucleic acids, it is advantageous to use marker genes (or reporter genes). Therefore, the genetic construct may optionally comprise a selectable marker gene. Selectable markers are described in more detail in the “definitions” section herein. The marker genes may be removed or excised from the transgenic cell once they are no longer needed. Techniques for marker removal are known in the art, useful techniques are described above in the definitions section.

### Regulatory Element/Control Sequence/Promoter

[0047] The terms “regulatory element”, “control sequence” and “promoter” are all used interchangeably herein and are to be taken in a broad context to refer to regulatory nucleic acid sequences capable of effecting expression of the sequences to which they are ligated. The term “promoter” typically refers to a nucleic acid control sequence located upstream from the transcriptional start of a gene and which is involved in recognising and binding of RNA polymerase and other proteins, thereby directing transcription of an operably linked nucleic acid. Encompassed by the aforementioned terms are transcriptional regulatory sequences derived from a classical eukaryotic genomic gene (including the TATA box which is required for accurate transcription initiation, with or without a CCAAT box sequence) and additional regulatory elements (i.e. upstream activating sequences, enhancers and silencers) which alter gene expression in response to developmental and/or external stimuli, or in a tissue-specific manner. Also included within the term is a transcriptional regulatory sequence of a classical prokaryotic gene, in which case it may include a −35 box sequence and/or −10 box transcriptional regulatory sequences. The term “regulatory element” also encompasses a synthetic fusion molecule or derivative that confers, activates or enhances expression of a nucleic acid molecule in a cell, tissue or organ.

[0048] A “plant promoter” comprises regulatory elements, which mediate the expression of a coding sequence segment in plant cells. Accordingly, a plant promoter need not be of plant origin, but may originate from viruses or micro-organisms, for example from viruses which attack plant cells. The “plant promoter” can also originate from a plant cell, e.g. from the plant which is transformed with the nucleic acid sequence to be expressed in the inventive process and described herein. This also applies to other “plant” regulatory signals, such as “plant” terminators. The promoters upstream of the nucleotide sequences useful in the methods of the present invention can be modified by one or more nucleotide substitution(s), insertion(s) and/or deletion(s) without interfering with the functionality or activity of either the promoters, the open reading frame (ORF) or the 3′-regulatory region such as terminators or other 3′ regulatory regions which are located away from the ORF. It is furthermore possible that the activity of the promoters is increased by modification of their sequence, or that they are replaced completely by more active promoters, even promoters from heterologous organisms. For expression in plants, the nucleic acid molecule must, as described above, be linked operably to or comprise a suitable promoter which expresses the gene at the right point in time and with the required spatial expression pattern.

[0049] For the identification of functionally equivalent promoters, the promoter strength and/or expression pattern of a candidate promoter may be analysed for example by operably linking the promoter to a reporter gene and assaying the expression level and pattern of the reporter gene in various tissues of the plant. Suitable well-known reporter genes include for example beta-glucuronidase or beta-galactosidase. The promoter activity is assayed by measuring the enzymatic activity of the beta-glucuronidase or beta-galactosidase. The promoter strength and/or expression pattern may then be compared to that of a reference promoter (such as the one used in the methods of the present invention). Alternatively, promoter strength may be assayed by quantifying mRNA levels or by comparing mRNA levels of the nucleic acid used in the methods of the present invention, with mRNA levels of housekeeping genes such as 18S rRNA, using methods known in the art, such as Northern blotting with densitometric analysis of autoradiograms, quantitative real-time PCR or RT-PCR (Heid et al., 1996 Genome Methods 6: 986-994). Generally by “weak promoter” is intended a promoter that drives expression of a coding sequence at a low level. By “low level” is intended at levels of about 1/10,000 transcripts to about 1/100,000 transcripts, to about 1/500,0000 transcripts per cell. Conversely, a “strong promoter” drives expression of a coding sequence at high level, or at about 1/10 transcripts to about 1/100 transcripts to about 1/1000 transcripts per cell. Generally, by “medium strength promoter” is intended a promoter that drives expression of a coding sequence at a lower level than a strong promoter, in particular at a level that is in all instances below that obtained when under the control of a 35S CaMV promoter.

### Operably Linked

[0050] The term “operably linked” as used herein refers to a functional linkage between the promoter sequence and the gene of interest, such that the promoter sequence is able to initiate transcription of the gene of interest.

### Constitutive Promoter

[0051] A “constitutive promoter” refers to a promoter that is transcriptionally active during most, but not necessarily all, phases of growth and development and under most environmental conditions, in at least one cell, tissue or organ. Table 2a below gives examples of constitutive promoters.

TABLE 2a
Examples of constitutive promoters

| Gene Source | Reference |
|---|---|
| Actin | McElroy et al, Plant Cell, 2: 163-171, 1990 |
| HMGP | WO 2004/070039 |
| CAMV 35S | Odell et al, Nature, 313: 810-812, 1985 |
| CaMV 19S | Nilsson et al., Physiol. Plant. 100: 456-462, 1997 |
| GOS2 | de Pater et al, Plant J Nov; 2(6): 837-44, 1992, WO 2004/065596 |
| Ubiquitin | Christensen et al, Plant Mol. Biol. 18: 675-689, 1992 |
| Rice cyclophilin | Buchholz et al, Plant Mol Biol. 25(5): 837-43, 1994 |
| Maize H3 histone | Lepetit et al, Mol. Gen. Genet. 231: 276-285, 1992 |
| Alfalfa H3 histone | Wu et al. Plant Mol. Biol. 11: 641-649, 1988 |
| Actin 2 | An et al, Plant J. 10(1); 107-121, 1996 |
| 34S FMV | Sanger et al., Plant. Mol. Biol., 14, 1990: 433-443 |
| Rubisco small subunit | U.S. Pat. No. 4,962,028 |
| OCS | Leisner (1988) Proc Natl Acad Sci USA 85(5): 2553 |
| SAD1 | Jain et al., Crop Science, 39 (6), 1999: 1696 |
| SAD2 | Jain et al., Crop Science, 39 (6), 1999: 1696 |
| nos | Shaw et al. (1984) Nucleic acid sequences Res. 12(20): 7831-7846 |
| V-ATPase | WO 01/14572 |
| Super promoter | WO 95/14098 |
| G-box proteins | WO 94/12015 |

### Ubiquitous Promoter

[0052] A ubiquitous promoter is active in substantially all tissues or cells of an organism.

### Developmentally-Regulated Promoter

[0053] A developmentally-regulated promoter is active during certain developmental stages or in parts of the plant that undergo developmental changes.

### Inducible Promoter

[0054] An inducible promoter has induced or increased transcription initiation in response to a chemical (for a review see Gatz 1997, Annu. Rev. Plant Physiol. Plant Mol. Biol., 48:89-108), environmental or physical stimulus, or may be “stress-inducible”, i.e. activated when a plant is exposed to various stress conditions, or a “pathogen-inducible” i.e. activated when a plant is exposed to exposure to various pathogens.

### Organ-Specific/Tissue-Specific Promoter

[0055] An organ-specific or tissue-specific promoter is one that is capable of preferentially initiating transcription in certain organs or tissues, such as the leaves, roots, seed tissue etc. For example, a “root-specific promoter” is a promoter that is transcriptionally active predominantly in plant roots, substantially to the exclusion of any other parts of a plant, whilst still allowing for any leaky expression in these other plant parts. Promoters able to initiate transcription in certain cells only are referred to herein as “cell-specific”.

[0056] Examples of root-specific promoters are listed in Table 2b below:

TABLE 2b
Examples of root-specific promoters

| Gene Source | Reference |
|---|---|
| RCc3 | Plant Mol Biol. 1995 January; 27(2): 237-48 |
| Arabidopsis PHT1 | Kovama et al., 2005; Mudge et al. (2002, Plant J. 31: 341) |
| Medicago phosphate transporter | Xiao et al., 2006 |
| Arabidopsis Pyk10 | Nitz et al. (2001) Plant Sci 161(2): 337-346 |
| root-expressible genes | Tingey et al., EMBO J. 6: 1, 1987. |
| tobacco auxin-inducible gene | Van der Zaal et al., Plant Mol. Biol. 16, 983, 1991. |
| β-tubulin | Oppenheimer, et al., Gene 63: 87, 1988. |
| tobacco root-specific genes | Conkling, et al., Plant Physiol. 93: 1203, 1990. |
| B. napus G1-3b gene | U.S. Pat. No. 5,401,836 |
| SbPRP1 | Suzuki et al., Plant Mol. Biol. 21: 109-119, 1993. |
| LRX1 | Baumberger et al. 2001, Genes & Dev. 15: 1128 |
| BTG-26 Brassica napus | US 20050044585 |
| LeAMT1 (tomato) | Lauter et al. (1996, PNAS 3: 8139) |
| The LeNRT1-1 (tomato) | Lauter et al. (1996, PNAS 3: 8139) |
| class I patatin gene (potato) | Liu et al., Plant Mol. Biol. 153: 386-395, 1991. |
| KDC1 (Daucus carota) | Downey et al. (2000, J. Biol. Chem. 275: 39420) |
| TobRB7 gene | W Song (1997) PhD Thesis, North Carolina State |
| | University, Raleigh, NC USA |
| OsRAB5a (rice) | Wang et al. 2002, Plant Sci. 163: 273 |
| ALF5 (Arabidopsis) | Diener et al. (2001, Plant Cell 13: 1625) |
| NRT2; 1Np (N. plumbaginifolia) | Quesada et al. (1997, Plant Mol. Biol. 34: 265) |

[0057] A seed-specific promoter is transcriptionally active predominantly in seed tissue, but not necessarily exclusively in seed tissue (in cases of leaky expression). The seed-specific promoter may be active during seed development and/or during germination. The seed specific promoter may be endosperm/aleurone/embryo specific. Examples of seed-specific promoters (endosperm/aleurone/embryo specific) are shown in Table 2c to Table 2f below. Further examples of seed-specific promoters are given in Qing Qu and Takaiwa (Plant Biotechnol. J. 2, 113-125, 2004), which disclosure is incorporated by reference herein as if fully set forth.

TABLE 2c
Examples of seed-specific promoters

| Gene source | Reference |
|---|---|
| seed-specific genes | Simon et al., Plant Mol. Biol. 5: 191, 1985; |
| | Scofield et al., J. Biol. Chem. 262: 12202, 1987.; |
| | Baszczynski et al., Plant Mol. Biol. 14: 633, 1990. |
| Brazil Nut albumin | Pearson et al., Plant Mol. Biol. 18: 235-245, 1992. |
| legumin | Ellis et al., Plant Mol. Biol. 10: 203-214, 1988. |
| glutelin (rice) | Takaiwa et al., Mol. Gen. Genet. 208: 15-22, 1986; |
| | Takaiwa et al., FEBS Letts. 221: 43-47, 1987. |
| zein | Matzke et al Plant Mol Biol, 14(3): 323-32 1990 |
| napA | Stalberg et al, Planta 199: 515-519, 1996. |
| wheat LMW and HMW glutenin-1 | Mol Gen Genet 216: 81-90, 1989; NAR 17: 461-2, 1989 |
| wheat SPA | Albani et al, Plant Cell, 9: 171-184, 1997 |
| wheat α, β, γ-gliadins | EMBO J. 3: 1409-15, 1984 |
| barley Itr1 promoter | Diaz et al. (1995) Mol Gen Genet 248(5): 592-8 |
| barley B1, C, D, hordein | Theor Appl Gen 98: 1253-62, 1999; Plant J 4: 343-55, 1993; |
| | Mol Gen Genet 250: 750-60, 1996 |
| barley DOF | Mena et al, The Plant Journal, 116(1): 53-62, 1998 |
| blz2 | EP99106056.7 |
| synthetic promoter | Vicente-Carbajosa et al., Plant J. 13: 629-640, 1998. |
| rice prolamin NRP33 | Wu et al, Plant Cell Physiology 39(8) 885-889, 1998 |
| rice a-globulin Glb-1 | Wu et al, Plant Cell Physiology 39(8) 885-889, 1998 |
| rice OSH1 | Sato et al, Proc. Natl. Acad. Sci. USA, 93: 8117-8122, |
| | 1996 |
| rice α-globulin REB/OHP-1 | Nakase et al. Plant Mol. Biol. 33: 513-522, 1997 |
| rice ADP-glucose pyrophos- | Trans Res 6: 157-68, 1997 |
| phorylase | |
| maize ESR gene family | Plant J 12: 235-46, 1997 |
| sorghum α-kafirin | DeRose et al., Plant Mol. Biol 32: 1029-35, 1996 |
| KNOX | Postma-Haarsma et al, Plant Mol. Biol. 39: 257-71, 1999 |
| rice oleosin | Wu et al, J. Biochem. 123: 386, 1998 |
| sunflower oleosin | Cummins et al., Plant Mol. Biol. 19: 873-876, 1992 |
| PRO0117, putative rice 40S | WO 2004/070039 |
| ribosomal protein | |
| PRO0136, rice alanine | unpublished |
| aminotransferase | |
| PRO0147, trypsin inhibitor ITR1 | unpublished |
| (barley) | |
| PRO0151, rice WSI18 | WO 2004/070039 |
| PRO0175, rice RAB21 | WO 2004/070039 |
| PRO005 | WO 2004/070039 |
| PRO0095 | WO 2004/070039 |
| α-amylase (Amy32b) | Lanahan et al, Plant Cell 4: 203-211, 1992; Skriver et al, |
| | Proc Natl Acad Sci USA 88: 7266-7270, 1991 |
| cathepsin β-like gene | Cejudo et al, Plant Mol Biol 20: 849-856, 1992 |
| Barley Ltp2 | Kalla et al., Plant J. 6: 849-60, 1994 |
| Chi26 | Leah et al., Plant J. 4: 579-89, 1994 |
| Maize B-Peru | Selinger et al., Genetics 149; 1125-38, 1998 |

TABLE 2d
examples of endosperm-specific promoters

| Gene source | Reference |
|---|---|
| glutelin (rice) | Takaiwa et al. (1986) Mol Gen Genet 208: 15-22; |
| | Takaiwa et al. (1987) FEBS Letts. 221: 43-47 |
| zein | Matzke et al., (1990) Plant Mol Biol 14(3): 323-32 |
| wheat LMW and HMW glutenin-1 | Colot et al. (1989) Mol Gen Genet 216: 81-90, |
| | Anderson et al. (1989) NAR 17: 461-2 |
| wheat SPA | Albani et al. (1997) Plant Cell 9: 171-184 |
| wheat gliadins | Rafalski et al. (1984) EMBO 3: 1409-15 |
| barley Itr1 promoter | Diaz et al. (1995) Mol Gen Genet 248(5): 592-8 |
| barley B1, C, D, hordein | Cho et al. (1999) Theor Appl Genet 98: 1253-62; |
| | Muller et al. (1993) Plant J 4: 343-55; |
| | Sorenson et al. (1996) Mol Gen Genet 250: 750-60 |
| barley DOF | Mena et al, (1998) Plant J 116(1): 53-62 |
| blz2 | Onate et al. (1999) J Biol Chem 274(14): 9175-82 |
| synthetic promoter | Vicente-Carbajosa et al. (1998) Plant J 13: 629-640 |
| rice prolamin NRP33 | Wu et al, (1998) Plant Cell Physiol 39(8) 885-889 |
| rice globulin Glb-1 | Wu et al. (1998) Plant Cell Physiol 39(8) 885-889 |
| rice globulin REB/OHP-1 | Nakase et al. (1997) Plant Molec Biol 33: 513-522 |
| rice ADP-glucose pyrophosphorylase | Russell et al. (1997) Trans Res 6: 157-68 |
| maize ESR gene family | Opsahl-Ferstad et al. (1997) Plant J 12: 235-46 |
| sorghum kafirin | DeRose et al. (1996) Plant Mol Biol 32: 1029-35 |

TABLE 2e
Examples of embryo specific promoters:

| Gene source | Reference |
|---|---|
| rice OSH1 | Sato et al, Proc. Natl. Acad. Sci. USA, 93: 8117-8122, |
| | 1996 |
| KNOX | Postma-Haarsma et al, Plant Mol. Biol. 39: 257-71, 1999 |
| PRO0151 | WO 2004/070039 |
| PRO0175 | WO 2004/070039 |
| PRO005 | WO 2004/070039 |
| PRO0095 | WO 2004/070039 |

TABLE 2f
Examples of aleurone-specific promoters:

| Gene source | Reference |
|---|---|
| α-amylase | Lanahan et al, Plant Cell 4: 203-211, 1992; |
| (Amy32b) | Skriver et al, Proc Natl Acad Sci USA 88: |
| | 7266-7270, 1991 |
| cathepsin β-like gene | Cejudo et al, Plant Mol Biol 20: 849-856, 1992 |
| Barley Ltp2 | Kalla et al., Plant J. 6: 849-60, 1994 |
| Chi26 | Leah et al., Plant J. 4: 579-89, 1994 |
| Maize B-Peru | Selinger et al., Genetics 149; 1125-38, 1998 |

[0058] A green tissue-specific promoter as defined herein is a promoter that is transcriptionally active predominantly in green tissue, substantially to the exclusion of any other parts of a plant, whilst still allowing for any leaky expression in these other plant parts.

[0059] Examples of green tissue-specific promoters which may be used to perform the methods of the invention are shown in Table 2 g below.

TABLE 2g
Examples of green tissue-specific promoters

| Gene | Expression | Reference |
|---|---|---|
| Maize Orthophosphate dikinase | Leaf specific | Fukavama et al., 2001 |
| Maize Phosphoenolpyruvate | Leaf specific | Kausch et al., 2001 |
| carboxylase | | |
| Rice Phosphoenolpyruvate | Leaf specific | Liu et al., 2003 |
| carboxylase | | |
| Rice small subunit Rubisco | Leaf specific | Nomura et al., 2000 |
| rice beta expansin EXBP9 | Shoot specific | WO 2004/070039 |
| Pigeonpea small subunit Rubisco | Leaf specific | Panguluri et al., 2005 |
| Pea RBCS3A | Leaf specific | |

[0060] Another example of a tissue-specific promoter is a meristem-specific promoter, which is transcriptionally active predominantly in meristematic tissue, substantially to the exclusion of any other parts of a plant, whilst still allowing for any leaky expression in these other plant parts. Examples of green meristem-specific promoters which may be used to perform the methods of the invention are shown in Table 2 h below.

TABLE 2h
Examples of meristem-specific promoters

| Gene source | Expression pattern | Reference |
|---|---|---|
| rice OSH1 | Shoot apical meristem, | Sato et al. (1996) |
| | from embryo globular | Proc. Natl. Acad. Sci. |
| | stage to seedling stage | USA, 93: 8117-8122 |
| Rice metallothionein | Meristem specific | BAD87835.1 |
| WAK1 & WAK 2 | Shoot and root apical | Wagner & Kohorn |
| | meristems, and in ex- | (2001) Plant Cell |
| | panding leaves and sepals | 13(2): 303-318 |

### Terminator

[0061] The term “terminator” encompasses a control sequence which is a DNA sequence at the end of a transcriptional unit which signals 3′ processing and polyadenylation of a primary transcript and termination of transcription. The terminator can be derived from the natural gene, from a variety of other plant genes, or from T-DNA. The terminator to be added may be derived from, for example, the nopaline synthase or octopine synthase genes, or alternatively from another plant gene, or less preferably from any other eukaryotic gene.

### Selectable Marker (Gene)/Reporter Gene

[0062] “Selectable marker”, “selectable marker gene” or “reporter gene” includes any gene that confers a phenotype on a cell in which it is expressed to facilitate the identification and/or selection of cells that are transfected or transformed with a nucleic acid construct of the invention. These marker genes enable the identification of a successful transfer of the nucleic acid molecules via a series of different principles. Suitable markers may be selected from markers that confer antibiotic or herbicide resistance, that introduce a new metabolic trait or that allow visual selection. Examples of selectable marker genes include genes conferring resistance to antibiotics (such as nptII that phosphorylates neomycin and kanamycin, or hpt, phosphorylating hygromycin, or genes conferring resistance to, for example, bleomycin, streptomycin, tetracyclin, chloramphenicol, ampicillin, gentamycin, geneticin (G418), spectinomycin or blasticidin), to herbicides (for example bar which provides resistance to Basta®; aroA or gox providing resistance against glyphosate, or the genes conferring resistance to, for example, imidazolinone, phosphinothricin or sulfonylurea), or genes that provide a metabolic trait (such as manA that allows plants to use mannose as sole carbon source or xylose isomerase for the utilisation of xylose, or antinutritive markers such as the resistance to 2-deoxyglucose). Expression of visual marker genes results in the formation of colour (for example β-glucuronidase, GUS or 3-galactosidase with its coloured substrates, for example X-Gal), luminescence (such as the luciferin/luceferase system) or fluorescence (Green Fluorescent Protein, GFP, and derivatives thereof). This list represents only a small number of possible markers. The skilled worker is familiar with such markers. Different markers are preferred, depending on the organism and the selection method.

[0063] It is known that upon stable or transient integration of nucleic acids into plant cells, only a minority of the cells takes up the foreign DNA and, if desired, integrates it into its genome, depending on the expression vector used and the transfection technique used. To identify and select these integrants, a gene coding for a selectable marker (such as the ones described above) is usually introduced into the host cells together with the gene of interest. These markers can for example be used in mutants in which these genes are not functional by, for example, deletion by conventional methods. Furthermore, nucleic acid molecules encoding a selectable marker can be introduced into a host cell on the same vector that comprises the sequence encoding the polypeptides of the invention or used in the methods of the invention, or else in a separate vector. Cells which have been stably transfected with the introduced nucleic acid can be identified for example by selection (for example, cells which have integrated the selectable marker survive whereas the other cells die).

[0064] Since the marker genes, particularly genes for resistance to antibiotics and herbicides, are no longer required or are undesired in the transgenic host cell once the nucleic acids have been introduced successfully, the process according to the invention for introducing the nucleic acids advantageously employs techniques which enable the removal or excision of these marker genes. One such a method is what is known as co-transformation. The co-transformation method employs two vectors simultaneously for the transformation, one vector bearing the nucleic acid according to the invention and a second bearing the marker gene(s). A large proportion of transformants receives or, in the case of plants, comprises (up to 40% or more of the transformants), both vectors. In case of transformation with Agrobacteria, the transformants usually receive only a part of the vector, i.e. the sequence flanked by the T-DNA, which usually represents the expression cassette. The marker genes can subsequently be removed from the transformed plant by performing crosses. In another method, marker genes integrated into a transposon are used for the transformation together with desired nucleic acid (known as the Ac/Ds technology). The transformants can be crossed with a transposase source or the transformants are transformed with a nucleic acid construct conferring expression of a transposase, transiently or stable. In some cases (approx. 10%), the transposon jumps out of the genome of the host cell once transformation has taken place successfully and is lost. In a further number of cases, the transposon jumps to a different location. In these cases the marker gene must be eliminated by performing crosses. In microbiology, techniques were developed which make possible, or facilitate, the detection of such events. A further advantageous method relies on what is known as recombination systems; whose advantage is that elimination by crossing can be dispensed with. The best-known system of this type is what is known as the Cre/lox system. Cre1 is a recombinase that removes the sequences located between the loxP sequences. If the marker gene is integrated between the loxP sequences, it is removed once transformation has taken place successfully, by expression of the recombinase. Further recombination systems are the HIN/HIX, FLP/FRT and REP/STB system (Tribble et al., J. Biol. Chem., 275, 2000: 22255-22267; Velmurugan et al., J. Cell Biol., 149, 2000: 553-566). A site-specific integration into the plant genome of the nucleic acid sequences according to the invention is possible. Naturally, these methods can also be applied to microorganisms such as yeast, fungi or bacteria.

### Transgenic/Transgene/Recombinant

[0065] For the purposes of the invention, “transgenic”, “transgene” or “recombinant” means with regard to, for example, a nucleic acid sequence, an expression cassette, gene construct or a vector comprising the nucleic acid sequence or an organism transformed with the nucleic acid sequences, expression cassettes or vectors according to the invention, all those constructions brought about by recombinant methods in which either
[0066] (a) the nucleic acid sequences encoding proteins useful in the methods of the invention, or
[0067] (b) genetic control sequence(s) which is operably linked with the nucleic acid sequence according to the invention, for example a promoter, or
[0068] (c) a) and b)
   are not located in their natural genetic environment or have been modified by recombinant methods, it being possible for the modification to take the form of, for example, a substitution, addition, deletion, inversion or insertion of one or more nucleotide residues. The natural genetic environment is understood as meaning the natural genomic or chromosomal locus in the original plant or the presence in a genomic library. In the case of a genomic library, the natural genetic environment of the nucleic acid sequence is preferably retained, at least in part. The environment flanks the nucleic acid sequence at least on one side and has a sequence length of at least 50 bp, preferably at least 500 bp, especially preferably at least 1000 bp, most preferably at least 5000 bp. A naturally occurring expression cassette—for example the naturally occurring combination of the natural promoter of the nucleic acid sequences with the corresponding nucleic acid sequence encoding a polypeptide useful in the methods of the present invention, as defined above—becomes a transgenic expression cassette when this expression cassette is modified by non-natural, synthetic (“artificial”) methods such as, for example, mutagenic treatment. Suitable methods are described, for example, in U.S. Pat. No. 5,565,350 or WO 00/15815.

[0069] A transgenic plant for the purposes of the invention is thus understood as meaning, as above, that the nucleic acids used in the method of the invention are not at their natural locus in the genome of said plant, it being possible for the nucleic acids to be expressed homologously or heterologously. However, as mentioned, transgenic also means that, while the nucleic acids according to the invention or used in the inventive method are at their natural position in the genome of a plant, the sequence has been modified with regard to the natural sequence, and/or that the regulatory sequences of the natural sequences have been modified. Transgenic is preferably understood as meaning the expression of the nucleic acids according to the invention at an unnatural locus in the genome, i.e. homologous or, preferably, heterologous expression of the nucleic acids takes place. Preferred transgenic plants are mentioned herein.

### Modulation

[0070] The term “modulation” means in relation to expression or gene expression, a process in which the expression level is changed by said gene expression in comparison to the control plant, the expression level may be increased or decreased. The original, unmodulated expression may be of any kind of expression of a structural RNA (rRNA, tRNA) or mRNA with subsequent translation. The term “modulating the activity” shall mean any change of the expression of the inventive nucleic acid sequences or encoded proteins, which leads to increased yield and/or increased growth of the plants.

### Expression

[0071] The term “expression” or “gene expression” means the transcription of a specific gene or specific genes or specific genetic construct. The term “expression” or “gene expression” in particular means the transcription of a gene or genes or genetic construct into structural RNA (rRNA, tRNA) or mRNA with or without subsequent translation of the latter into a protein. The process includes transcription of DNA and processing of the resulting mRNA product.

### Increased Expression/Overexpression

[0072] The term “increased expression” or “overexpression” as used herein means any form of expression that is additional to the original wild-type expression level.

[0073] Methods for increasing expression of genes or gene products are well documented in the art and include, for example, overexpression driven by appropriate promoters, the use of transcription enhancers or translation enhancers. Isolated nucleic acids which serve as promoter or enhancer elements may be introduced in an appropriate position (typically upstream) of a non-heterologous form of a polynucleotide so as to upregulate expression of a nucleic acid encoding the polypeptide of interest. For example, endogenous promoters may be altered in vivo by mutation, deletion, and/or substitution (see, Kmiec, U.S. Pat. No. 5,565,350; Zarling et al., WO9322443), or isolated promoters may be introduced into a plant cell in the proper orientation and distance from a gene of the present invention so as to control the expression of the gene.

[0074] If polypeptide expression is desired, it is generally desirable to include a polyadenylation region at the 3′-end of a polynucleotide coding region. The polyadenylation region can be derived from the natural gene, from a variety of other plant genes, or from T-DNA. The 3′ end sequence to be added may be derived from, for example, the nopaline synthase or octopine synthase genes, or alternatively from another plant gene, or less preferably from any other eukaryotic gene.

[0075] An intron sequence may also be added to the 5′ untranslated region (UTR) or the coding sequence of the partial coding sequence to increase the amount of the mature message that accumulates in the cytosol. Inclusion of a spliceable intron in the transcription unit in both plant and animal expression constructs has been shown to increase gene expression at both the mRNA and protein levels up to 1000-fold (Buchman and Berg (1988) Mol. Cell. biol. 8: 4395-4405; Callis et al. (1987) Genes Dev 1:1183-1200). Such intron enhancement of gene expression is typically greatest when placed near the 5′ end of the transcription unit. Use of the maize introns Adh1-S intron 1, 2, and 6, the Bronze-1 intron are known in the art. For general information see: The Maize Handbook, Chapter 116, reeling and Walbot, Eds., Springer, N.Y. (1994).

### Decreased Expression

[0076] Reference herein to “decreased expression” or “reduction or substantial elimination” of expression is taken to mean a decrease in endogenous gene expression and/or polypeptide levels and/or polypeptide activity relative to control plants. The reduction or substantial elimination is in increasing order of preference at least 10%, 20%, 30%, 40% or 50%, 60%, 70%, 80%, 85%, 90%, or 95%, 96%, 97%, 98%, 99% or more reduced compared to that of control plants.

[0077] For the reduction or substantial elimination of expression an endogenous gene in a plant, a sufficient length of substantially contiguous nucleotides of a nucleic acid sequence is required. In order to perform gene silencing, this may be as little as 20, 19, 18, 17, 16, 15, 14, 13, 12, 11, 10 or fewer nucleotides, alternatively this may be as much as the entire gene (including the 5′ and/or 3′ UTR, either in part or in whole). The stretch of substantially contiguous nucleotides may be derived from the nucleic acid encoding the protein of interest (target gene), or from any nucleic acid capable of encoding an orthologue, paralogue or homologue of the protein of interest. Preferably, the stretch of substantially contiguous nucleotides is capable of forming hydrogen bonds with the target gene (either sense or antisense strand), more preferably, the stretch of substantially contiguous nucleotides has, in increasing order of preference, 50%, 60%, 70%, 80%, 85%, 90%, 95%, 96%, 97%, 98%, 99%, 100% sequence identity to the target gene (either sense or antisense strand). A nucleic acid sequence encoding a (functional) polypeptide is not a requirement for the various methods discussed herein for the reduction or substantial elimination of expression of an endogenous gene.

[0078] This reduction or substantial elimination of expression may be achieved using routine tools and techniques. A preferred method for the reduction or substantial elimination of endogenous gene expression is by introducing and expressing in a plant a genetic construct into which the nucleic acid (in this case a stretch of substantially contiguous nucleotides derived from the gene of interest, or from any nucleic acid capable of encoding an orthologue, paralogue or homologue of any one of the protein of interest) is cloned as an inverted repeat (in part or completely), separated by a spacer (non-coding DNA).

[0079] In such a preferred method, expression of the endogenous gene is reduced or substantially eliminated through RNA-mediated silencing using an inverted repeat of a nucleic acid or a part thereof (in this case a stretch of substantially contiguous nucleotides derived from the gene of interest, or from any nucleic acid capable of encoding an orthologue, paralogue or homologue of the protein of interest), preferably capable of forming a hairpin structure. The inverted repeat is cloned in an expression vector comprising control sequences. A non-coding DNA nucleic acid sequence (a spacer, for example a matrix attachment region fragment (MAR), an intron, a polylinker, etc.) is located between the two inverted nucleic acids forming the inverted repeat. After transcription of the inverted repeat, a chimeric RNA with a self-complementary structure is formed (partial or complete). This double-stranded RNA structure is referred to as the hairpin RNA (hpRNA). The hpRNA is processed by the plant into siRNAs that are incorporated into an RNA-induced silencing complex (RISC). The RISC further cleaves the mRNA transcripts, thereby substantially reducing the number of mRNA transcripts to be translated into polypeptides. For further general details see for example, Grierson et al. (1998) WO 98/53083; Waterhouse et al. (1999) WO 99/53050).

[0080] Performance of the methods of the invention does not rely on introducing and expressing in a plant a genetic construct into which the nucleic acid is cloned as an inverted repeat, but any one or more of several well-known “gene silencing” methods may be used to achieve the same effects.

[0081] One such method for the reduction of endogenous gene expression is RNA-mediated silencing of gene expression (downregulation). Silencing in this case is triggered in a plant by a double stranded RNA sequence (dsRNA) that is substantially similar to the target endogenous gene. This dsRNA is further processed by the plant into about 20 to about 26 nucleotides called short interfering RNAs (siRNAs). The siRNAs are incorporated into an RNA-induced silencing complex (RISC) that cleaves the mRNA transcript of the endogenous target gene, thereby substantially reducing the number of mRNA transcripts to be translated into a polypeptide. Preferably, the double stranded RNA sequence corresponds to a target gene.

[0082] Another example of an RNA silencing method involves the introduction of nucleic acid sequences or parts thereof (in this case a stretch of substantially contiguous nucleotides derived from the gene of interest, or from any nucleic acid capable of encoding an orthologue, paralogue or homologue of the protein of interest) in a sense orientation into a plant. “Sense orientation” refers to a DNA sequence that is homologous to an mRNA transcript thereof. Introduced into a plant would therefore be at least one copy of the nucleic acid sequence. The additional nucleic acid sequence will reduce expression of the endogenous gene, giving rise to a phenomenon known as co-suppression. The reduction of gene expression will be more pronounced if several additional copies of a nucleic acid sequence are introduced into the plant, as there is a positive correlation between high transcript levels and the triggering of co-suppression.

[0083] Another example of an RNA silencing method involves the use of antisense nucleic acid sequences. An “antisense” nucleic acid sequence comprises a nucleotide sequence that is complementary to a “sense” nucleic acid sequence encoding a protein, i.e. complementary to the coding strand of a double-stranded cDNA molecule or complementary to an mRNA transcript sequence. The antisense nucleic acid sequence is preferably complementary to the endogenous gene to be silenced. The complementarity may be located in the “coding region” and/or in the “non-coding region” of a gene. The term “coding region” refers to a region of the nucleotide sequence comprising codons that are translated into amino acid residues. The term “non-coding region” refers to 5′ and 3′ sequences that flank the coding region that are transcribed but not translated into amino acids (also referred to as 5′ and 3′ untranslated regions).

[0084] Antisense nucleic acid sequences can be designed according to the rules of Watson and Crick base pairing. The antisense nucleic acid sequence may be complementary to the entire nucleic acid sequence (in this case a stretch of substantially contiguous nucleotides derived from the gene of interest, or from any nucleic acid capable of encoding an orthologue, paralogue or homologue of the protein of interest), but may also be an oligonucleotide that is antisense to only a part of the nucleic acid sequence (including the mRNA 5′ and 3′ UTR). For example, the antisense oligonucleotide sequence may be complementary to the region surrounding the translation start site of an mRNA transcript encoding a polypeptide. The length of a suitable antisense oligonucleotide sequence is known in the art and may start from about 50, 45, 40, 35, 30, 25, 20, 15 or 10 nucleotides in length or less. An antisense nucleic acid sequence according to the invention may be constructed using chemical synthesis and enzymatic ligation reactions using methods known in the art. For example, an antisense nucleic acid sequence (e.g., an antisense oligonucleotide sequence) may be chemically synthesized using naturally occurring nucleotides or variously modified nucleotides designed to increase the biological stability of the molecules or to increase the physical stability of the duplex formed between the antisense and sense nucleic acid sequences, e.g., phosphorothioate derivatives and acridine substituted nucleotides may be used. Examples of modified nucleotides that may be used to generate the antisense nucleic acid sequences are well known in the art. Known nucleotide modifications include methylation, cyclization and ‘caps’ and substitution of one or more of the naturally occurring nucleotides with an analogue such as inosine. Other modifications of nucleotides are well known in the art.

[0085] The antisense nucleic acid sequence can be produced biologically using an expression vector into which a nucleic acid sequence has been subcloned in an antisense orientation (i.e., RNA transcribed from the inserted nucleic acid will be of an antisense orientation to a target nucleic acid of interest). Preferably, production of antisense nucleic acid sequences in plants occurs by means of a stably integrated nucleic acid construct comprising a promoter, an operably linked antisense oligonucleotide, and a terminator.

[0086] The nucleic acid molecules used for silencing in the methods of the invention (whether introduced into a plant or generated in situ) hybridize with or bind to mRNA transcripts and/or genomic DNA encoding a polypeptide to thereby inhibit expression of the protein, e.g., by inhibiting transcription and/or translation. The hybridization can be by conventional nucleotide complementarity to form a stable duplex, or, for example, in the case of an antisense nucleic acid sequence which binds to DNA duplexes, through specific interactions in the major groove of the double helix. Antisense nucleic acid sequences may be introduced into a plant by transformation or direct injection at a specific tissue site. Alternatively, antisense nucleic acid sequences can be modified to target selected cells and then administered systemically. For example, for systemic administration, antisense nucleic acid sequences can be modified such that they specifically bind to receptors or antigens expressed on a selected cell surface, e.g., by linking the antisense nucleic acid sequence to peptides or antibodies which bind to cell surface receptors or antigens. The antisense nucleic acid sequences can also be delivered to cells using the vectors described herein.

[0087] According to a further aspect, the antisense nucleic acid sequence is an a-anomeric nucleic acid sequence. An a-anomeric nucleic acid sequence forms specific double-stranded hybrids with complementary RNA in which, contrary to the usual b-units, the strands run parallel to each other (Gaultier et al. (1987) Nucl Ac Res 15: 6625-6641). The antisense nucleic acid sequence may also comprise a 2′-o-methylribonucleotide (Inoue et al. (1987) Nucl Ac Res 15, 6131-6148) or a chimeric RNA-DNA analogue (Inoue et al. (1987) FEBS Lett. 215, 327-330).

[0088] The reduction or substantial elimination of endogenous gene expression may also be performed using ribozymes. Ribozymes are catalytic RNA molecules with ribonuclease activity that are capable of cleaving a single-stranded nucleic acid sequence, such as an mRNA, to which they have a complementary region. Thus, ribozymes (e.g., hammerhead ribozymes (described in Haselhoff and Gerlach (1988) Nature 334, 585-591) can be used to catalytically cleave mRNA transcripts encoding a polypeptide, thereby substantially reducing the number of mRNA transcripts to be translated into a polypeptide. A ribozyme having specificity for a nucleic acid sequence can be designed (see for example: Cech et al. U.S. Pat. No. 4,987,071; and Cech et al. U.S. Pat. No. 5,116,742). Alternatively, mRNA transcripts corresponding to a nucleic acid sequence can be used to select a catalytic RNA having a specific ribonuclease activity from a pool of RNA molecules (Bartel and Szostak (1993) Science 261, 1411-1418). The use of ribozymes for gene silencing in plants is known in the art (e.g., Atkins et al. (1994) WO 94/00012; Lenne et al. (1995) WO 95/03404; Lutziger et al. (2000) WO 00/00619; Prinsen et al. (1997) WO 97/13865 and Scott et al. (1997) WO 97/38116).

[0089] Gene silencing may also be achieved by insertion mutagenesis (for example, T-DNA insertion or transposon insertion) or by strategies as described by, among others, Angell and Baulcombe ((1999) Plant J 20(3): 357-62), (Amplicon VIGS WO 98/36083), or Baulcombe (WO 99/15682).

[0090] Gene silencing may also occur if there is a mutation on an endogenous gene and/or a mutation on an isolated gene/nucleic acid subsequently introduced into a plant. The reduction or substantial elimination may be caused by a non-functional polypeptide. For example, the polypeptide may bind to various interacting proteins; one or more mutation(s) and/or truncation(s) may therefore provide for a polypeptide that is still able to bind interacting proteins (such as receptor proteins) but that cannot exhibit its normal function (such as signalling ligand).

[0091] A further approach to gene silencing is by targeting nucleic acid sequences complementary to the regulatory region of the gene (e.g., the promoter and/or enhancers) to form triple helical structures that prevent transcription of the gene in target cells. See Helene, C., Anticancer Drug Res. 6, 569-84, 1991; Helene et al., Ann. N.Y. Acad. Sci. 660, 27-36 1992; and Maher, L. J. Bioassays 14, 807-15, 1992.

[0092] Other methods, such as the use of antibodies directed to an endogenous polypeptide for inhibiting its function in planta, or interference in the signalling pathway in which a polypeptide is involved, will be well known to the skilled man. In particular, it can be envisaged that manmade molecules may be useful for inhibiting the biological function of a target polypeptide, or for interfering with the signalling pathway in which the target polypeptide is involved.

[0093] Alternatively, a screening program may be set up to identify in a plant population natural variants of a gene, which variants encode polypeptides with reduced activity. Such natural variants may also be used for example, to perform homologous recombination.

[0094] Artificial and/or natural microRNAs (miRNAs) may be used to knock out gene expression and/or mRNA translation. Endogenous miRNAs are single stranded small RNAs of typically 19-24 nucleotides long. They function primarily to regulate gene expression and/or mRNA translation. Most plant microRNAs (miRNAs) have perfect or near-perfect complementarity with their target sequences. However, there are natural targets with up to five mismatches. They are processed from longer non-coding RNAs with characteristic fold-back structures by double-strand specific RNases of the Dicer family. Upon processing, they are incorporated in the RNA-induced silencing complex (RISC) by binding to its main component, an Argonaute protein. mRNAs serve as the specificity components of RISC, since they base-pair to target nucleic acids, mostly mRNAs, in the cytoplasm. Subsequent regulatory events include target mRNA cleavage and destruction and/or translational inhibition. Effects of miRNA overexpression are thus often reflected in decreased mRNA levels of target genes.

[0095] Artificial microRNAs (amiRNAs), which are typically 21 nucleotides in length, can be genetically engineered specifically to negatively regulate gene expression of single or multiple genes of interest. Determinants of plant microRNA target selection are well known in the art. Empirical parameters for target recognition have been defined and can be used to aid in the design of specific amiRNAs, (Schwab et al., Dev. Cell 8, 517-527, 2005). Convenient tools for design and generation of amiRNAs and their precursors are also available to the public (Schwab et al., Plant Cell 18, 1121-1133, 2006).

[0096] For optimal performance, the gene silencing techniques used for reducing expression in a plant of an endogenous gene requires the use of nucleic acid sequences from monocotyledonous plants for transformation of monocotyledonous plants, and from dicotyledonous plants for transformation of dicotyledonous plants. Preferably, a nucleic acid sequence from any given plant species is introduced into that same species. For example, a nucleic acid sequence from rice is transformed into a rice plant. However, it is not an absolute requirement that the nucleic acid sequence to be introduced originates from the same plant species as the plant in which it will be introduced. It is sufficient that there is substantial homology between the endogenous target gene and the nucleic acid to be introduced.

[0097] Described above are examples of various methods for the reduction or substantial elimination of expression in a plant of an endogenous gene. A person skilled in the art would readily be able to adapt the aforementioned methods for silencing so as to achieve reduction of expression of an endogenous gene in a whole plant or in parts thereof through the use of an appropriate promoter, for example.

### Transformation

[0098] The term “introduction” or “transformation” as referred to herein encompasses the transfer of an exogenous polynucleotide into a host cell, irrespective of the method used for transfer. Plant tissue capable of subsequent clonal propagation, whether by organogenesis or embryogenesis, may be transformed with a genetic construct of the present invention and a whole plant regenerated there from. The particular tissue chosen will vary depending on the clonal propagation systems available for, and best suited to, the particular species being transformed. Exemplary tissue targets include leaf disks, pollen, embryos, cotyledons, hypocotyls, megagametophytes, callus tissue, existing meristematic tissue (e.g., apical meristem, axillary buds, and root meristems), and induced meristem tissue (e.g., cotyledon meristem and hypocotyl meristem). The polynucleotide may be transiently or stably introduced into a host cell and may be maintained non-integrated, for example, as a plasmid. Alternatively, it may be integrated into the host genome. The resulting transformed plant cell may then be used to regenerate a transformed plant in a manner known to persons skilled in the art.

[0099] The transfer of foreign genes into the genome of a plant is called transformation. Transformation of plant species is now a fairly routine technique. Advantageously, any of several transformation methods may be used to introduce the gene of interest into a suitable ancestor cell. The methods described for the transformation and regeneration of plants from plant tissues or plant cells may be utilized for transient or for stable transformation. Transformation methods include the use of liposomes, electroporation, chemicals that increase free DNA uptake, injection of the DNA directly into the plant, particle gun bombardment, transformation using viruses or pollen and microprojection. Methods may be selected from the calcium/polyethylene glycol method for protoplasts (Krens, F. A. et al., (1982) Nature 296, 72-74; Negrutiu I et al. (1987) Plant Mol Biol 8: 363-373); electroporation of protoplasts (Shillito R. D. et al. (1985) Bio/Technol 3, 1099-1102); microinjection into plant material (Crossway A et al., (1986) Mol. Gen. Genet. 202: 179-185); DNA or RNA-coated particle bombardment (Klein T M et al., (1987) Nature 327: 70) infection with (non-integrative) viruses and the like. Transgenic plants, including transgenic crop plants, are preferably produced via Agrobacterium-mediated transformation. An advantageous transformation method is the transformation in planta. To this end, it is possible, for example, to allow the agrobacteria to act on plant seeds or to inoculate the plant meristem with agrobacteria. It has proved particularly expedient in accordance with the invention to allow a suspension of transformed agrobacteria to act on the intact plant or at least on the flower primordia. The plant is subsequently grown on until the seeds of the treated plant are obtained (Clough and Bent, Plant J. (1998) 16, 735-743). Methods for Agrobacterium-mediated transformation of rice include well known methods for rice transformation, such as those described in any of the following: European patent application EP 1198985 A1, Aldemita and Hodges (Planta 199: 612-617, 1996); Chan et al. (Plant Mol Biol 22 (3): 491-506, 1993), Hiei et al. (Plant J 6 (2): 271-282, 1994), which disclosures are incorporated by reference herein as if fully set forth. In the case of corn transformation, the preferred method is as described in either Ishida et al. (Nat. Biotechnol 14(6): 745-50, 1996) or Frame et al. (Plant Physiol 129(1): 13-22, 2002), which disclosures are incorporated by reference herein as if fully set forth. Said methods are further described by way of example in B. Jenes et al., Techniques for Gene Transfer, in: Transgenic Plants, Vol. 1, Engineering and Utilization, eds. S. D. Kung and R. Wu, Academic Press (1993) 128-143 and in Potrykus Annu. Rev. Plant Physiol. Plant Molec. Biol. 42 (1991) 205-225). The nucleic acids or the construct to be expressed is preferably cloned into a vector, which is suitable for transforming Agrobacterium tumefaciens, for example pBin19 (Bevan et al., Nucl. Acids Res. 12 (1984) 8711). Agrobacteria transformed by such a vector can then be used in known manner for the transformation of plants, such as plants used as a model, like Arabidopsis (Arabidopsis thaliana is within the scope of the present invention not considered as a crop plant), or crop plants such as, by way of example, tobacco plants, for example by immersing bruised leaves or chopped leaves in an agrobacterial solution and then culturing them in suitable media. The transformation of plants by means of Agrobacterium tumefaciens is described, for example, by Höfgen and Willmitzer in Nucl. Acid Res. (1988) 16, 9877 or is known inter alia from F. F. White, Vectors for Gene Transfer in Higher Plants; in Transgenic Plants, Vol. 1, Engineering and Utilization, eds. S. D. Kung and R. Wu, Academic Press, 1993, pp. 15-38.

[0100] In addition to the transformation of somatic cells, which then have to be regenerated into intact plants, it is also possible to transform the cells of plant meristems and in particular those cells which develop into gametes. In this case, the transformed gametes follow the natural plant development, giving rise to transgenic plants. Thus, for example, seeds of Arabidopsis are treated with agrobacteria and seeds are obtained from the developing plants of which a certain proportion is transformed and thus transgenic [Feldman, K A and Marks M D (1987). Mol Gen Genet. 208:274-289; Feldmann K (1992). In: C Koncz, N-H Chua and J Shell, eds, Methods in Arabidopsis Research. Word Scientific, Singapore, pp. 274-289]. Alternative methods are based on the repeated removal f the inflorescences and incubation of the excision site in the center of the rosette with transformed agrobacteria, whereby transformed seeds can likewise be obtained at a later point in time (Chang (1994). Plant J. 5: 551-558; Katavic (1994). Mol Gen Genet, 245: 363-370). However, an especially effective method is the vacuum infiltration method with its modifications such as the “floral dip” method. In the case of vacuum infiltration of Arabidopsis, intact plants under reduced pressure are treated with an agrobacterial suspension [Bechthold, N (1993). C R Acad Sci Paris Life Sci, 316: 1194-1199], while in the case of the “floral dip” method the developing floral tissue is incubated briefly with a surfactant-treated agrobacterial suspension [Clough, S J and Bent A F (1998) The Plant J. 16, 735-743]. A certain proportion of transgenic seeds are harvested in both cases, and these seeds can be distinguished from non-transgenic seeds by growing under the above-described selective conditions. In addition the stable transformation of plastids is of advantages because plastids are inherited maternally is most crops reducing or eliminating the risk of transgene flow through pollen. The transformation of the chloroplast genome is generally achieved by a process which has been schematically displayed in Klaus et al., 2004 [Nature Biotechnology 22 (2), 225-229]. Briefly the sequences to be transformed are cloned together with a selectable marker gene between flanking sequences homologous to the chloroplast genome. These homologous flanking sequences direct site specific integration into the plastome. Plastidal transformation has been described for many different plant species and an overview is given in Bock (2001) Transgenic plastids in basic research and plant biotechnology. J Mol. Biol. 2001 Sep. 21; 312 (3):425-38 or Maliga, P (2003) Progress towards commercialization of plastid transformation technology. Trends Biotechnol. 21, 20-28. Further biotechnological progress has recently been reported in form of marker free plastid transformants, which can be produced by a transient co-integrated maker gene (Klaus et al., 2004, Nature Biotechnology 22(2), 225-229).

[0101] The genetically modified plant cells can be regenerated via all methods with which the skilled worker is familiar. Suitable methods can be found in the abovementioned publications by S. D. Kung and R. Wu, Potrykus or Hofgen and Willmitzer.

[0102] Generally after transformation, plant cells or cell groupings are selected for the presence of one or more markers which are encoded by plant-expressible genes co-transferred with the gene of interest, following which the transformed material is regenerated into a whole plant. To select transformed plants, the plant material obtained in the transformation is, as a rule, subjected to selective conditions so that transformed plants can be distinguished from untransformed plants. For example, the seeds obtained in the above-described manner can be planted and, after an initial growing period, subjected to a suitable selection by spraying. A further possibility consists in growing the seeds, if appropriate after sterilization, on agar plates using a suitable selection agent so that only the transformed seeds can grow into plants. Alternatively, the transformed plants are screened for the presence of a selectable marker such as the ones described above.

[0103] Following DNA transfer and regeneration, putatively transformed plants may also be evaluated, for instance using Southern analysis, for the presence of the gene of interest, copy number and/or genomic organisation. Alternatively or additionally, expression levels of the newly introduced DNA may be monitored using Northern and/or Western analysis, both techniques being well known to persons having ordinary skill in the art.

[0104] The generated transformed plants may be propagated by a variety of means, such as by clonal propagation or classical breeding techniques. For example, a first generation (or T1) transformed plant may be selfed and homozygous second-generation (or T2) transformants selected, and the T2 plants may then further be propagated through classical breeding techniques. The generated transformed organisms may take a variety of forms. For example, they may be chimeras of transformed cells and non-transformed cells; clonal transformants (e.g., all cells transformed to contain the expression cassette); grafts of transformed and untransformed tissues (e.g., in plants, a transformed rootstock grafted to an untransformed scion).

[0105] T-DNA Activation Tagging

[0106] T-DNA activation tagging (Hayashi et al. Science (1992) 1350-1353), involves insertion of T-DNA, usually containing a promoter (may also be a translation enhancer or an intron), in the genomic region of the gene of interest or 10 kb up- or downstream of the coding region of a gene in a configuration such that the promoter directs expression of the targeted gene. Typically, regulation of expression of the targeted gene by its natural promoter is disrupted and the gene falls under the control of the newly introduced promoter. The promoter is typically embedded in a T-DNA. This T-DNA is randomly inserted into the plant genome, for example, through Agrobacterium infection and leads to modified expression of genes near the inserted T-DNA. The resulting transgenic plants show dominant phenotypes due to modified expression of genes close to the introduced promoter.

### Tilling

[0107] The term “TILLING” is an abbreviation of “Targeted Induced Local Lesions In Genomes” and refers to a mutagenesis technology useful to generate and/or identify nucleic acids encoding proteins with modified expression and/or activity. TILLING also allows selection of plants carrying such mutant variants. These mutant variants may exhibit modified expression, either in strength or in location or in timing (if the mutations affect the promoter for example). These mutant variants may exhibit higher activity than that exhibited by the gene in its natural form. TILLING combines high-density mutagenesis with high-throughput screening methods. The steps typically followed in TILLING are: (a) EMS mutagenesis (Redei G P and Koncz C (1992) In Methods in Arabidopsis Research, Koncz C, Chua N H, Schell J, eds. Singapore, World Scientific Publishing Co, pp. 16-82; Feldmann et al., (1994) In Meyerowitz E M, Somerville C R, eds, Arabidopsis. Cold Spring Harbor Laboratory Press, Cold Spring Harbor, N.Y., pp 137-172; Lightner J and Caspar T (1998) In J Martinez-Zapater, J Salinas, eds, Methods on Molecular Biology, Vol. 82. Humana Press, Totowa, N.J., pp 91-104); (b) DNA preparation and pooling of individuals; (c) PCR amplification of a region of interest; (d) denaturation and annealing to allow formation of heteroduplexes; (e) DHPLC, where the presence of a heteroduplex in a pool is detected as an extra peak in the chromatogram; (f) identification of the mutant individual; and (g) sequencing of the mutant PCR product. Methods for TILLING are well known in the art (McCallum et al., (2000) Nat Biotechnol 18: 455-457; reviewed by Stemple (2004) Nat Rev Genet. 5(2): 145-50).

### Homologous Recombination

[0108] Homologous recombination allows introduction in a genome of a selected nucleic acid at a defined selected position. Homologous recombination is a standard technology used routinely in biological sciences for lower organisms such as yeast or the moss Physcomitrella. Methods for performing homologous recombination in plants have been described not only for model plants (Offring a et al. (1990) EMBO J. 9(10): 3077-84) but also for crop plants, for example rice (Terada et al. (2002) Nat Biotech 20(10): 1030-4; Iida and Terada (2004) Curr Opin Biotech 15(2): 132-8), and approaches exist that are generally applicable regardless of the target organism (Miller et al, Nature Biotechnol. 25, 778-785, 2007).

### Yield Related Traits

[0109] Yield related traits comprise one or more of yield, biomass, seed yield, early vigour, greenness index, increased growth rate, improved agronomic traits (such as improved Water Use Efficiency (WUE), Nitrogen Use Efficiency (NUE), etc.).

### Yield

[0110] The term “yield” in general means a measurable produce of economic value, typically related to a specified crop, to an area, and to a period of time. Individual plant parts directly contribute to yield based on their number, size and/or weight, or the actual yield is the yield per square meter for a crop and year, which is determined by dividing total production (includes both harvested and appraised production) by planted square meters. The term “yield” of a plant may relate to vegetative biomass (root and/or shoot biomass), to reproductive organs, and/or to propagules (such as seeds) of that plant.

[0111] Taking corn as an example, a yield increase may be manifested as one or more of the following: increase in the number of plants established per square meter, an increase in the number of ears per plant, an increase in the number of rows, number of kernels per row, kernel weight, thousand kernel weight, ear length/diameter, increase in the seed filling rate (which is the number of filled seeds divided by the total number of seeds and multiplied by 100), among others. Taking rice as an example, a yield increase may manifest itself as an increase in one or more of the following: number of plants per square meter, number of panicles per plant, panicle length, number of spikelets per panicle, number of flowers (florets) per panicle, increase in the seed filling rate (which is the number of filled seeds divided by the total number of seeds and multiplied by 100), increase in thousand kernel weight, among others. In rice, submergence tolerance may also result in increased yield.

### Early Vigour

[0112] “Early vigour” refers to active healthy well-balanced growth especially during early stages of plant growth, and may result from increased plant fitness due to, for example, the plants being better adapted to their environment (i.e. optimizing the use of energy resources and partitioning between shoot and root). Plants having early vigour also show increased seedling survival and a better establishment of the crop, which often results in highly uniform fields (with the crop growing in uniform manner, i.e. with the majority of plants reaching the various stages of development at substantially the same time), and often better and higher yield. Therefore, early vigour may be determined by measuring various factors, such as thousand kernel weight, percentage germination, percentage emergence, seedling growth, seedling height, root length, root and shoot biomass and many more.

### Increased Growth Rate

[0113] The increased growth rate may be specific to one or more parts of a plant (including seeds), or may be throughout substantially the whole plant. Plants having an increased growth rate may have a shorter life cycle. The life cycle of a plant may be taken to mean the time needed to grow from a dry mature seed up to the stage where the plant has produced dry mature seeds, similar to the starting material. This life cycle may be influenced by factors such as speed of germination, early vigour, growth rate, greenness index, flowering time and speed of seed maturation. The increase in growth rate may take place at one or more stages in the life cycle of a plant or during substantially the whole plant life cycle. Increased growth rate during the early stages in the life cycle of a plant may reflect enhanced vigour. The increase in growth rate may alter the harvest cycle of a plant allowing plants to be sown later and/or harvested sooner than would otherwise be possible (a similar effect may be obtained with earlier flowering time). If the growth rate is sufficiently increased, it may allow for the further sowing of seeds of the same plant species (for example sowing and harvesting of rice plants followed by sowing and harvesting of further rice plants all within one conventional growing period). Similarly, if the growth rate is sufficiently increased, it may allow for the further sowing of seeds of different plants species (for example the sowing and harvesting of corn plants followed by, for example, the sowing and optional harvesting of soybean, potato or any other suitable plant). Harvesting additional times from the same rootstock in the case of some crop plants may also be possible. Altering the harvest cycle of a plant may lead to an increase in annual biomass production per square meter (due to an increase in the number of times (say in a year) that any particular plant may be grown and harvested). An increase in growth rate may also allow for the cultivation of transgenic plants in a wider geographical area than their wild-type counterparts, since the territorial limitations for growing a crop are often determined by adverse environmental conditions either at the time of planting (early season) or at the time of harvesting (late season). Such adverse conditions may be avoided if the harvest cycle is shortened. The growth rate may be determined by deriving various parameters from growth curves, such parameters may be: T-Mid (the time taken for plants to reach 50% of their maximal size) and T-90 (time taken for plants to reach 90% of their maximal size), amongst others.

### Stress Resistance

[0114] An increase in yield and/or growth rate occurs whether the plant is under non-stress conditions or whether the plant is exposed to various stresses compared to control plants. Plants typically respond to exposure to stress by growing more slowly. In conditions of severe stress, the plant may even stop growing altogether. Mild stress on the other hand is defined herein as being any stress to which a plant is exposed which does not result in the plant ceasing to grow altogether without the capacity to resume growth. Mild stress in the sense of the invention leads to a reduction in the growth of the stressed plants of less than 40%, 35%, 30% or 25%, more preferably less than 20% or 15% in comparison to the control plant under non-stress conditions. Due to advances in agricultural practices (irrigation, fertilization, pesticide treatments) severe stresses are not often encountered in cultivated crop plants. As a consequence, the compromised growth induced by mild stress is often an undesirable feature for agriculture. Mild stresses are the everyday biotic and/or abiotic (environmental) stresses to which a plant is exposed. Abiotic stresses may be due to drought or excess water, anaerobic stress, salt stress, chemical toxicity, oxidative stress and hot, cold or freezing temperatures. The abiotic stress may be an osmotic stress caused by a water stress (particularly due to drought), salt stress, oxidative stress or an ionic stress. Biotic stresses are typically those stresses caused by pathogens, such as bacteria, viruses, fungi, nematodes and insects.

[0115] In particular, the methods of the present invention may be performed under non-stress conditions or under conditions of mild drought to give plants having increased yield relative to control plants. As reported in Wang et al. (Planta (2003) 218: 1-14), abiotic stress leads to a series of morphological, physiological, biochemical and molecular changes that adversely affect plant growth and productivity. Drought, salinity, extreme temperatures and oxidative stress are known to be interconnected and may induce growth and cellular damage through similar mechanisms. Rabbani et al. (Plant Physiol (2003) 133: 1755-1767) describes a particularly high degree of “cross talk” between drought stress and high-salinity stress. For example, drought and/or salinisation are manifested primarily as osmotic stress, resulting in the disruption of homeostasis and ion distribution in the cell. Oxidative stress, which frequently accompanies high or low temperature, salinity or drought stress, may cause denaturing of functional and structural proteins. As a consequence, these diverse environmental stresses often activate similar cell signalling pathways and cellular responses, such as the production of stress proteins, up-regulation of anti-oxidants, accumulation of compatible solutes and growth arrest. The term “non-stress” conditions as used herein are those environmental conditions that allow optimal growth of plants. Persons skilled in the art are aware of normal soil conditions and climatic conditions for a given location. Plants with optimal growth conditions, (grown under non-stress conditions) typically yield in increasing order of preference at least 97%, 95%, 92%, 90%, 87%, 85%, 83%, 80%, 77% or 75% of the average production of such plant in a given environment. Average production may be calculated on harvest and/or season basis. Persons skilled in the art are aware of average yield productions of a crop.

[0116] Nutrient deficiency may result from a lack of nutrients such as nitrogen, phosphates and other phosphorous-containing compounds, potassium, calcium, magnesium, manganese, iron and boron, amongst others.

[0117] The term salt stress is not restricted to common salt (NaCl), but may be any one or more of: NaCl, KCl, LiCl, MgCl₂, CaCl₂, amongst others.

### Increase/Improve/Enhance

[0118] The terms “increase”, “improve” or “enhance” are interchangeable and shall mean in the sense of the application at least a 3%, 4%, 5%, 6%, 7%, 8%, 9% or 10%, preferably at least 15% or 20%, more preferably 25%, 30%, 35% or 40% more yield and/or growth in comparison to control plants as defined herein.

### Seed Yield

[0119] Increased seed yield may manifest itself as one or more of the following: a) an increase in seed biomass (total seed weight) which may be on an individual seed basis and/or per plant and/or per square meter; b) increased number of flowers per plant; c) increased number of (filled) seeds; d) increased seed filling rate (which is expressed as the ratio between the number of filled seeds divided by the total number of seeds); e) increased harvest index, which is expressed as a ratio of the yield of harvestable parts, such as seeds, divided by the total biomass; and f) increased thousand kernel weight (TKW), which is extrapolated from the number of filled seeds counted and their total weight. An increased TKW may result from an increased seed size and/or seed weight, and may also result from an increase in embryo and/or endosperm size.

[0120] An increase in seed yield may also be manifested as an increase in seed size and/or seed volume. Furthermore, an increase in seed yield may also manifest itself as an increase in seed area and/or seed length and/or seed width and/or seed perimeter. Increased yield may also result in modified architecture, or may occur because of modified architecture.

### Greenness Index

[0121] The “greenness index” as used herein is calculated from digital images of plants. For each pixel belonging to the plant object on the image, the ratio of the green value versus the red value (in the RGB model for encoding color) is calculated. The greenness index is expressed as the percentage of pixels for which the green-to-red ratio exceeds a given threshold. Under normal growth conditions, under salt stress growth conditions, and under reduced nutrient availability growth conditions, the greenness index of plants is measured in the last imaging before flowering. In contrast, under drought stress growth conditions, the greenness index of plants is measured in the first imaging after drought.

### Marker Assisted Breeding

[0122] Such breeding programmes sometimes require introduction of allelic variation by mutagenic treatment of the plants, using for example EMS mutagenesis; alternatively, the programme may start with a collection of allelic variants of so called “natural” origin caused unintentionally. Identification of allelic variants then takes place, for example, by PCR. This is followed by a step for selection of superior allelic variants of the sequence in question and which give increased yield. Selection is typically carried out by monitoring growth performance of plants containing different allelic variants of the sequence in question. Growth performance may be monitored in a greenhouse or in the field. Further optional steps include crossing plants in which the superior allelic variant was identified with another plant. This could be used, for example, to make a combination of interesting phenotypic features.

### Use as Probes in (Gene Mapping)

[0123] Use of nucleic acids encoding the protein of interest for genetically and physically mapping the genes requires only a nucleic acid sequence of at least 15 nucleotides in length. These nucleic acids may be used as restriction fragment length polymorphism (RFLP) markers. Southern blots (Sambrook J, Fritsch E F and Maniatis T (1989) Molecular Cloning, A Laboratory Manual) of restriction-digested plant genomic DNA may be probed with the ISYT-LIKE-encoding nucleic acids. The resulting banding patterns may then be subjected to genetic analyses using computer programs such as MapMaker (Lander et al. (1987) Genomics 1: 174-181) in order to construct a genetic map. In addition, the nucleic acids may be used to probe Southern blots containing restriction endonuclease-treated genomic DNAs of a set of individuals representing parent and progeny of a defined genetic cross. Segregation of the DNA polymorphisms is noted and used to calculate the position of the iSYT-like polypeptide-encoding nucleic acid in the genetic map previously obtained using this population (Botstein et al. (1980) Am. J. Hum. Genet. 32:314-331).

[0124] The production and use of plant gene-derived probes for use in genetic mapping is described in Bernatzky and Tanksley (1986) Plant Mol. Biol. Reporter 4: 37-41. Numerous publications describe genetic mapping of specific cDNA clones using the methodology outlined above or variations thereof. For example, F2 intercross populations, backcross populations, randomly mated populations, near isogenic lines, and other sets of individuals may be used for mapping. Such methodologies are well known to those skilled in the art.

[0125] The nucleic acid probes may also be used for physical mapping (i.e., placement of sequences on physical maps; see Hoheisel et al. In: Non-mammalian Genomic Analysis: A Practical Guide, Academic press 1996, pp. 319-346, and references cited therein).

[0126] In another embodiment, the nucleic acid probes may be used in direct fluorescence in situ hybridisation (FISH) mapping (Trask (1991) Trends Genet. 7:149-154). Although current methods of FISH mapping favour use of large clones (several kb to several hundred kb; see Laan et al. (1995) Genome Res. 5:13-20), improvements in sensitivity may allow performance of FISH mapping using shorter probes.

[0127] A variety of nucleic acid amplification-based methods for genetic and physical mapping may be carried out using the nucleic acids. Examples include allele-specific amplification (Kazazian (1989) J. Lab. Clin. Med. 11:95-96), polymorphism of PCR-amplified fragments (CAPS; Sheffield et al. (1993) Genomics 16:325-332), allele-specific ligation (Landegren et al. (1988) Science 241:1077-1080), nucleotide extension reactions (Sokolov (1990) Nucleic Acid Res. 18:3671), Radiation Hybrid Mapping (Walter et al. (1997) Nat. Genet. 7:22-28) and Happy Mapping (Dear and Cook (1989) Nucleic Acid Res. 17:6795-6807). For these methods, the sequence of a nucleic acid is used to design and produce primer pairs for use in the amplification reaction or in primer extension reactions. The design of such primers is well known to those skilled in the art. In methods employing PCR-based genetic mapping, it may be necessary to identify DNA sequence differences between the parents of the mapping cross in the region corresponding to the instant nucleic acid sequence. This, however, is generally not necessary for mapping methods.

### Plant

[0128] The term “plant” as used herein encompasses whole plants, ancestors and progeny of the plants and plant parts, including seeds, shoots, stems, leaves, roots (including tubers), flowers, and tissues and organs, wherein each of the aforementioned comprise the gene/nucleic acid of interest. The term “plant” also encompasses plant cells, suspension cultures, callus tissue, embryos, meristematic regions, gametophytes, sporophytes, pollen and microspores, again wherein each of the aforementioned comprises the gene/nucleic acid of interest.

[0129] Plants that are particularly useful in the methods of the invention include all plants which belong to the superfamily Viridiplantae, in particular monocotyledonous and dicotyledonous plants including fodder or forage legumes, ornamental plants, food crops, trees or shrubs selected from the list comprising Acer spp., Actinidia spp., Abelmoschus spp., Agave sisalana, Agropyron spp., Agrostis stolonifera, Allium spp., Amaranthus spp., Ammophila arenaria, Ananas comosus, Annona spp., Apium graveolens, Arachis spp, Artocarpus spp., Asparagus officinalis, Avena spp. (e.g. Avena sativa, Avena fatua, Avena byzantina, Avena fatua var. sativa, Avena hybrida), Averrhoa carambola, Bambusa sp., Benincasa hispida, Bertholletia excelsea, Beta vulgaris, Brassica spp. (e.g. Brassica napus, Brassica rapa ssp. [canola, oilseed rape, turnip rape]), Cadaba farinosa, Camellia sinensis, Canna indica, Cannabis sativa, Capsicum spp., Carex elata, Carica papaya, Carissa macrocarpa, Carya spp., Carthamus tinctorius, Castanea spp., Ceiba pentandra, Cichorium endivia, Cinnamomum spp., Citrullus lanatus, Citrus spp., Cocos spp., Coffea spp., Colocasia esculenta, Cola spp., Corchorus sp., Coriandrum sativum, Corylus spp., Crataegus spp., Crocus sativus, Cucurbita spp., Cucumis spp., Cynara spp., Daucus carota, Desmodium spp., Dimocarpus longan, Dioscorea spp., Diospyros spp., Echinochloa spp., Elaeis (e.g. Elaeis guineensis, Elaeis oleifera), Eleusine coracana, Eragrostis tef, Erianthus sp., Eriobotrya japonica, Eucalyptus sp., Eugenia uniflora, Fagopyrum spp., Fagus spp., Festuca arundinacea, Ficus carica, Fortunella spp., Fragaria spp., Ginkgo biloba, Glycine spp. (e.g. Glycine max, Soja hispida or Soja max), Gossypium hirsutum, Helianthus spp. (e.g. Helianthus annuus), Hemerocallis fulva, Hibiscus spp., Hordeum spp. (e.g. Hordeum vulgare), Ipomoea batatas, Juglans spp., Lactuca sativa, Lathyrus spp., Lens culinaris, Linum usitatissimum, Litchi chinensis, Lotus spp., Luffa acutangula, Lupinus spp., Luzula sylvatica, Lycopersicon spp. (e.g. Lycopersicon esculentum, Lycopersicon lycopersicum, Lycopersicon pyriforme), Macrotyloma spp., Malus spp., Malpighia emarginata, Mammea americana, Mangifera indica, Manihot spp., Manilkara zapota, Medicago sativa, Melilotus spp., Mentha spp., Miscanthus sinensis, Momordica spp., Morus nigra, Musa spp., Nicotiana spp., Olea spp., Opuntia spp., Ornithopus spp., Oryza spp. (e.g. Oryza sativa, Oryza latifolia), Panicum miliaceum, Panicum virgatum, Passiflora edulis, Pastinaca sativa, Pennisetum sp., Persea spp., Petroselinum crispum, Phalaris arundinacea, Phaseolus spp., Phleum pratense, Phoenix spp., Phragmites australis, Physalis spp., Pinus spp., Pistacia vera, Pisum spp., Poa spp., Populus spp., Prosopis spp., Prunus spp., Psidium spp., Punica granatum, Pyrus communis, Quercus spp., Raphanus sativus, Rheum rhabarbarum, Ribes spp., Ricinus communis, Rubus spp., Saccharum spp., Salix sp., Sambucus spp., Secale cereale, Sesamum spp., Sinapis sp., Solanum spp. (e.g. Solanum tuberosum, Solanum integrifolium or Solanum lycopersicum), Sorghum bicolor, Spinacia spp., Syzygium spp., Tagetes spp., Tamarindus indica, Theobroma cacao, Trifolium spp., Tripsacum dactyloides, Triticosecale rimpaui, Triticum spp. (e.g. Triticum aestivum, Triticum durum, Triticum turgidum, Triticum hybernum, Triticum macha, Triticum sativum, Triticum monococcum or Triticum vulgare), Tropaeolum minus, Tropaeolum majus, Vaccinium spp., Vicia spp., Vigna spp., Viola odorata, Vitis spp., Zea mays, Zizania palustris, Ziziphus spp., amongst others.

### Control Plant(s)

[0130] The choice of suitable control plants is a routine part of an experimental setup and may include corresponding wild type plants or corresponding plants without the gene of interest. The control plant is typically of the same plant species or even of the same variety as the plant to be assessed. The control plant may also be a nullizygote of the plant to be assessed. Nullizygotes are individuals missing the transgene by segregation. A “control plant” as used herein refers not only to whole plants, but also to plant parts, including seeds and seed parts.

### DETAILED DESCRIPTION OF THE INVENTION

[0131] Surprisingly, it has now been found that modulating expression in a plant of one or more nucleic acid(s) encoding at least two iSYT polypeptides selected from the group consisting of any of the polypeptides of Table A, homologues thereof and fusions of the same gives plants having enhanced yield-related traits relative to control plants. According to a first embodiment, the present invention provides a method for enhancing yield-related traits in plants relative to control plants, comprising modulating expression in a plant of one or more nucleic acid(s) encoding at least two iSYT polypeptides selected from the group consisting of any of the polypeptides of Table A, homologues thereof and fusions of the same and optionally selecting for plants having enhanced yield-related traits.

[0132] A preferred method for modulating, increasing or decreasing expression of a nucleic acid encoding at least two iSYT polypeptides selected from the group consisting of any of the polypeptides of Table A, homologues thereof and fusions of the same is by introducing and expressing in a plant a nucleic acid encoding a iSYT-like polypeptide.

[0133] Any reference hereinafter to a “protein useful in the methods of the invention” is taken to mean an iSYT polypeptide, homologue thereof or fusions of the same as defined herein. Any reference hereinafter to a “nucleic acid useful in the methods of the invention” is taken to mean a nucleic acid capable of encoding such an iSYT polypeptide, homologue thereof or fusions of the same. The nucleic acid to be introduced into a plant (and therefore useful in performing the methods of the invention) is any nucleic acid encoding the type of protein which will now be described, hereafter also named “iSYT nucleic acid” or “iSYT gene”.

[0134] An “iSYT polypeptide” as defined herein refers to any of the polypeptide of Table A and maybe represented by the corresponding amino acid sequence as provided in the sequence listing. Further description of an iSYT polypeptide is provided in Table B.

[0135] An “iSYT-like polypeptide” as defined herein refers to any polypeptide selected from the group consisting of any of the polypeptides of Table A, homologues thereof and fusions of the same.

[0136] Polypeptides useful in the methods of the invention are iSYT polypeptides as well as iSYT-like polypeptides.

[0137] A fusion of iSYT and/or iSYT-like polypeptides is preferably encoded by a nucleic acid which may be constructed using well known recombinant DNA techniques (Sambrook J, Fritsch E F and Maniatis T (1989) Molecular Cloning, A Laboratory Manual). For example the protein fusion may comprise a fusion of the entire iSYT and/or iSYT-like polypeptides or of only a portion of the same, for example the N-terminal or the C-terminal portion. Preferably the portion comprises one or more of the conserved domain corresponding to the domains of Tables C1 to C20 of the corresponding iSYT polypeptide.

### Concerning SYT

[0138] SYT as defined herein refers to the polypeptide encoded by the AN3 (ANGUSTIFOLIA 3) gene of Arabidopsis thaliana. Alternative names for the AN3 gene are GIF1 gene and SYT1 gene. The genomic locus and the AGI reference of the SYT gene is AT5g28640.

[0139] The terms “SYT”, “SYT1” and “AN3” as used herein are interexchangable.

[0140] A “SYT polypeptide” as referred herein is represented by the sequence:

MQQHLMQMQPMMAGYYPSNVTSDHIQQYLDENKSLILKIVESQNSGKLSE
CAENQARLQRNLMYLAAIADSQPQPPSVHSQYGSAGGGMIQGEGGSHYLQ
QQQATQQQQMTQQSLMAARSSMLYAQQQQQQQPYATLQHQQLHHSQLGMS
SSSGGGGSSGLHILQGEAGGFHDFGRGKPEMGSGGGGEGRGGSSGDGGET
LYLKSSDDGN

[0141] A “SYT Polypeptide” useful in the methods of the invention is preferably encoded by the following nucleic acid:

ATGCAACAGCACCTGATGCAGATGCAGCCCATGATGGCTGGTTACTACCC
CAGCAATGTTACCTCTGATCATATCCAACAGTACTTGGACGAAAACAAAT
CGTTGATTCTGAAGATTGTTGAGTCTCAAAACTCTGGAAAGCTTAGCGAA
TGCGCCGAGAATCAAGCAAGGCTTCAACGCAACCTAATGTACCTAGCTGC
AATAGCAGATTCTCAGCCTCAGCCACCAAGTGTGCATAGCCAGTATGGAT
CTGCTGGTGGTGGGATGATTCAGGGAGAAGGAGGGTCACACTATTTGCAG
CAGCAACAAGCGACTCAACAGCAACAGATGACTCAGCAGTCTCTAATGGC
GGCTCGATCTTCAATGTTGTATGCTCAGCAACAGCAGCAGCAGCAGCCTT
ACGCGACGCTTCAGCATCAGCAATTGCACCATAGCCAGCTTGGAATGAGC
TCGAGCAGCGGAGGAGGAGGAAGCAGTGGTCTCCATATCCTTCAGGGAGA
GGCTGGTGGGTTTCATGATTTTGGCCGTGGGAAGCCGGAAATGGGAAGTG
GTGGTGGCGGTGAAGGCAGAGGAGGAAGTTCAGGGGATGGTGGAGAAACC
CTTTACTTGAAATCATCAGATGATGGGAATTGA

[0142] Alternatively or additionally, the term “SYT polypeptide or homologue thereof” as defined herein refers to a polypeptide comprising an SNH domain having in increasing order of preference at least 40%, 45%, 50%, 55%, 60%, 65%, 70%, 75%, 80%, 85%, 90%, 91%, 92%, 93%, 94%, 95%, 96%, 97%, 98%, 99% sequence identity to the SNH domain of SEQ ID NO: 670.

SEQ ID NO: 670:
IQQYLDENKSLILKIVESQNSGKLSECAENQARLQRNLMYLAAIAD

[0143] Preferred homologues of a SYT polypeptide useful in the methods of the invention are listed in Table A1.

[0144] Preferably the methods of the invention concern a homologue of a SYT polypeptide derived from a crop plant more preferably, in increasing order of preference from corn, sugar cane, soybean, wheat, cotton and canola.

[0145] Additionally or alternatively, the homologue of a SYT polypeptide useful in the method in the invention has in increasing order of preference at least 25%, 26%, 27%, 28%, 29%, 30%, 31%, 32%, 33%, 34%, 35%, 36%, 37%, 38%, 39%, 40%, 41%, 42%, 43%, 44%, 45%, 46%, 47%, 48%, 49%, 50%, 51%, 52%, 53%, 54%, 55%, 56%, 57%, 58%, 59%, 60%, 81%, 62%, 63%, 64%, 65%, 66%, 67%, 68%, 69%, 70%, 71%, 72%, 73%, 74%, 75%, 76%, 77%, 78%, 79%, 80%, 81%, 82%, 83%, 84%, 85%, 86%, 87%, 88%, 89%, 90%, 91%, 92%, 93%, 94%, 95%, 96%, 97%, 98%, 99% or 100% overall sequence identity to the amino acid represented by any one of the polypeptide sequences of Table A1 or of the SYT Polypeptide. The overall sequence identity is determined using a global alignment algorithm, such as the Needleman Wunsch algorithm in the program GAP (GCG Wisconsin Package, Accelrys), preferably with default parameters and preferably with sequences of mature proteins (i.e. without taking into account secretion signals or transit peptides). Compared to overall sequence identity, the sequence identity will generally be higher when only conserved domains or motifs are considered.

[0146] Preferably an iSYT, a homologue thereof or a fusion of the same useful in the methods of the invention comprises a domain having in increasing order of preference at least 50%, 51%, 52%, 53%, 54%, 55%, 56%, 57%, 58%, 59%, 60%, 61%, 62%, 63%, 64%, 65%, 66%, 67%, 68%, 69%, 70%, 71%, 72%, 73%, 74%, 75%, 76%, 77%, 78%, 79%, 80%, 81%, 82%, 83%, 84%, 85%, 86%, 87%, 88%, 89%, 90%, 91%, 92%, 93%, 94%, 95%, 96%, 97%, 98%, 99% or 100% sequence identity to the amino acid sequence of one or more of the conserved domain located at specific amino acid coordinates of an iSYT polypeptide according to Tables C1 to C20, preferably to the domain identified in the HMMSmart database.

[0147] For Example, a homologue of the iSYT AT1G05370 polypeptide useful in the methods of the invention comprises a domain having in increasing order of preference at least 50%, 51%, 52%, 53%, 54%, 55%, 56%, 57%, 58%, 59%, 60%, 61%, 62%, 63%, 64%, 65%, 66%, 67%, 68%, 69%, 70%, 71%, 72%, 73%, 74%, 75%, 76%, 77%, 78%, 79%, 80%, 81%, 82%, 83%, 84%, 85%, 86%, 87%, 88%, 89%, 90%, 91%, 92%, 93%, 94%, 95%, 96%, 97%, 98%, 99% or 100% sequence identity to the amino acid sequence of any one or more of the conserved domains according to Table C1, preferably to the domain SM00516 located at amino acid coordinates 86-229 of the iSYT AT1 G05370 polypeptide.

[0148] Preferred homologues of an iSYT polypeptide useful in the methods of the invention are given in Tables A1 to A26.

[0149] Additionally or alternatively, the homologue of a iSYT polypeptide useful in the method in the invention has in increasing order of preference at least 25%, 26%, 27%, 28%, 29%, 30%, 31%, 32%, 33%, 34%, 35%, 36%, 37%, 38%, 39%, 40%, 41%, 42%, 43%, 44%, 45%, 46%, 47%, 48%, 49%, 50%, 51%, 52%, 53%, 54%, 55%, 56%, 57%, 58%, 59%, 60%, 61%, 62%, 63%, 64%, 65%, 66%, 67%, 68%, 69%, 70%, 71%, 72%, 73%, 74%, 75%, 76%, 77%, 78%, 79%, 80%, 81%, 82%, 83%, 84%, 85%, 86%, 87%, 88%, 89%, 90%, 91%, 92%, 93%, 94%, 95%, 96%, 97%, 98%, 99% or 100% overall sequence identity to the amino acid represented by any one of the polypeptide sequences selected from the group consisting of the polypeptides of Table A and Tables A1 to A26. The overall sequence identity is determined using a global alignment algorithm, such as the Needleman Wunsch algorithm in the program GAP (GCG Wisconsin Package, Accelrys), preferably with default parameters and preferably with sequences of mature proteins (i.e. without taking into account secretion signals or transit peptides). Compared to overall sequence identity, the sequence identity will generally be higher when only conserved domains or motifs are considered.

[0150] Preferably the methods of the invention concern a homologue of an iSYT polypeptide derived from a crop plant more preferably, in increasing order of preference from corn, sugar cane, soybean, wheat, cotton and canola.

[0151] The terms “domain”, “signature” and “motif” are defined in the “definitions” section herein.

[0152] In one embodiment preferred combinations of two iSYT polypeptide whose expression is to be modulated according the methods of the invention are provided on Table 3. In another further preferred embodiment homologues of such iSYT polypeptides are combined, more preferably from a monocotyledoneous plant, more preferably from rice or corn plants.

TABLE 3
Combinations of two iSYT polypeptides.

| Combination | iSYT polypeptide 1 | ortholog of | iSYT polypeptide 2 | ortholog of |
|---|---|---|---|---|
| Combi1 | (AT5G28640) | | (AT1G18450) | |
| Combi2 | (AT5G28640) | | (AT3G60830) | |
| Combi3 | (AT5G28640) | | (AT2G46020) | |
| Combi4 | (AT5G28640) | | (AT2G28290) | |
| Combi5 | (AT5G28640) | | (AT1G21700) | |
| Combi6 | (AT5G28640) | | (AT5G14170) | |
| Combi7 | (AT5G28640) | | (AT1G23900) | |
| Combi8 | (AT5G28640) | | (AT2G18876) | |
| Combi9 | (AT5G28640) | | (AT4G27550) | |
| Combi10 | (AT5G28640) | | (AT1G65980) | |
| Combi11 | (AT5G28640) | | (AT1G05370) | |
| Combi12 | (AT5G28640) | | (AT4G35550) | |
| Combi13 | (AT5G28640) | | (AT4G21540) | |
| Combi14 | (AT5G28640) | | (AT1G20670) | |
| Combi15 | (AT2G46020) | | (AT2G28290) | |
| Combi16 | (AT5g23690) | | (AT3G60830) | |
| Combi17 | (AT3G60830) | | (AT1G18450) | |
| Combi18 | (AT4g17330) | | (AT2G46020) | |
| Combi19 | Poptr_importin beta | AT5G53480 | Poptr_importin alpha | AT3g06720 |
| Combi20 | Zeama_SYT1 | AT5G28640 | Zeama_SWIB/MDM2/CHC1 | AT5G14170 |
| | | | like protein | |
| Combi21 | Zeama_SYT1 | AT5G28640 | Zeama_hypothetical | AT5G17510 |
| | | | protein, heme binding | |
| Combi22 | Zeama_SYT1 | AT5G28640 | Poptr_ARP7 | AT3G60830 |
| Combi23 | Poptr_ARP7 | AT3G60830 | Poptr_ARP4 | AT1G18450 |

[0153] Encompassed on Table 4 are the corresponding orthologoues iSYT-like polypeptides originating from poplar or corn cells.

[0154] Another aspect of the invention is an isolated AN3-based protein complex, comprising at least the proteins AN3p and one or more of the proteins selected from the group encoded by AT4G16143, AT1G09270, AT3G06720, AT5G53480, AT3G60830, AT1G18450, AT2G46020, AT2G28290, AT1G21700, AT5G14170, AT4G17330, AT4G27550, AT1G65980, AT5G55210, AT3G15000, AT4G35550, AT1G20670, AT1G08730, AT5G13030, AT2G18876, AT5G17510, AT1G05370, AT4G21540, AT1G23900 and AT5G23690 (genes listed in Table II). Preferably, said AN3-based protein complex comprises at least the proteins AN3p and one or more proteins selected from the group consisting of ARP4 (AT1G18450), ARP7 (AT3G60830), SNF2 (AT2G46020), SYD (AT2G28290), SWI3C (AT1G21700) and SWP73B (AT5G14170). Even more preferably, said AN3-based protein complex comprises at least AN3p, an actin related protein selected from the group consisting of ARP4 and ARP7, an ATPase selected from the group consisting of SNF2 (BRM) and SYD and a SWIRM domain containing protein. Preferably, said SWIRM domain containing protein is SWI3C. An AN3-based protein complex as used here means that AN3p is interacting, directly or indirectly, with the other proteins of the complex. A direct interaction is an interaction where at least one domain of AN3p interacts with one or more domains or the interaction partner. An indirect interaction is an interaction where AN3p itself is not interacting with the interacting protein by one of its domains, but where said interacting protein is interacting with a protein that is directly or indirectly interacting with AN3p.

[0155] A further aspect of the invention is the use of a protein complex according to the invention to promote plant growth. Preferably, said use is an overexpression of the protein complex, by overexpressing at least two members of the protein complex. Promotion of plant growth, as used here, is an increase in plant biomass in plants where the protein complex is used, compared with the same plant where the complex is not used, grown under the same conditions, except for the conditions needed for the use of the complex, if any. Such conditions may be, as a non limited example, the addition of one or more compounds to induce one or more promoters of one or more genes encoding a protein of the complex. Alternatively, the same plant is an untransformed parental plant, grown under the same conditions as the transformed plant, wherein the complex is used. Preferably, promotion of plant growth results in an increased yield. This yield can be a total increase in plant biomass, or a partial increase of yield, such as, but not limited to seed yield, leave yield or root yield.

[0156] Still another aspect of the invention is a method to promote AN3-based protein complex formation, by simultaneous overexpression of at least two proteins of the complex. Proteins of the complex, beside AN3p itself, are listed in table II. Preferably, said overexpression is an overexpression of AN3p and one or more proteins selected from the group consisting of ARP4 (AT1G18450), ARP7 (AT3G60830), SNF2 (AT2G46020), SYD (AT2G28290), SWI3C (AT1G21700) and SWP73B (AT5G14170). Even more preferably, said overexpression is an overexpression of at least AN3p, an actin related protein selected from the group consisting of ARP4 and ARP7, an ATPase selected from the group consisting of SNF2 (BRM) and SYD and a SWIRM domain containing protein. Preferably, said SWIRM domain containing protein is SWI3C.

[0157] Methods for obtaining overexpression are known to the person skilled in the art, and comprise, but are not limited to placing the gene encoding the protein to be overexpressed after a strong promoter such as the Cauliflower Mosaic Virus ³⁵S promoter. Simultaneous overexpression as used here means that there is an overlap in timeframe for all the proteins to be overexpressed, whereby the level of said proteins is increased when compared to a non-overexpressed control. It does not necessarily mean that all genes should be induced at the same moment. Depending upon the turnover of the messenger RNA and/or the protein, one gene may be induced before or after another, as long as there is an overlap in time where both proteins are present in a concentration that is higher than the normal (non-overexpressed) concentration.

[0158] In addition, two or three iSYT-like polypeptides, when expressed in rice according to the methods of the present invention as outlined in the Examples section, give plants having increased yield related traits, selected from increased aboveground biomass or increased seed yield.

[0159] The present invention is illustrated by transforming plants with the nucleic acid sequences comprising the gene encoding the combinations of the polypeptides of Table 4. However, performance of the invention is not restricted to these sequences; the methods of the invention may advantageously be performed using any iSYT-like-encoding nucleic acid or iSYT-like polypeptide as defined herein.

[0160] Examples of nucleic acids encoding iSYT-like polypeptides are given in Table A an Tables A2 to A26 of the Examples section herein. Such nucleic acids are useful in performing the methods of the invention. The amino acid sequences given in Tables A2 to A26 of the Examples section are example sequences of orthologues and paralogues of the iSYT polypeptide of Table A, the terms “orthologues” and “paralogues” being as defined herein. Further orthologues and paralogues may readily be identified by performing a so-called reciprocal blast search as described in the definitions section; where the query sequence is SEQ ID NO: 1 or SEQ ID NO: 2, the second BLAST (back-BLAST) would be against Arabidopsis thaliana sequences.

[0161] The invention also provides hitherto unknown iSYT-encoding nucleic acids and iSYT polypeptides useful for conferring enhanced yield-related traits in plants relative to control plants.

[0162] According to a further embodiment of the present invention, there is therefore provided an isolated nucleic acid molecule selected from:
[0163] (i) a nucleic acid represented by any one of the polynucleotides of Tables A2 to A26;
[0164] (ii) the complement of a nucleic acid of (i);
[0165] (iii) a nucleic acid encoding an iSYT-like polypeptide having in increasing order of preference at least 50%, 51%, 52%, 53%, 54%, 55%, 56%, 57%, 58%, 59%, 60%, 61%, 62%, 63%, 64%, 65%, 66%, 67%, 68%, 69%, 70%, 71%, 72%, 73%, 74%, 75%, 76%, 77%, 78%, 79%, 80%, 81%, 82%, 83%, 84%, 85%, 86%, 87%, 88%, 89%, 90%, 91%, 92%, 93%, 94%, 95%, 96%, 97%, 98% 99% or 100% sequence identity to the amino acid sequence of any of the polypeptides of Table A2 to A26 and further preferably conferring enhanced yield-related traits relative to control plants.
[0166] (iv) a nucleic acid molecule which hybridizes with a nucleic acid molecule of (i) to (iii) under high stringency hybridization conditions and preferably confers enhanced yield-related traits relative to control plants.

[0167] According to a further embodiment of the present invention, there is also provided an isolated polypeptide selected from:
[0168] (i) an amino acid sequence represented by any one of the polypeptides of Tables A2 to A26;
[0169] (ii) an amino acid sequence having, in increasing order of preference, at least 50%, 51%, 52%, 53%, 54%, 55%, 56%, 57%, 58%, 59%, 60%, 81%, 62%, 63%, 64%, 65%, 66%, 67%, 68%, 69%, 70%, 71%, 72%, 73%, 74%, 75%, 76%, 77%, 78%, 79%, 80%, 81%, 82%, 83%, 84%, 85%, 86%, 87%, 88%, 89%, 90%, 91%, 92%, 93%, 94%, 95%, 96%, 97%, 98%, or 99% sequence identity to the amino acid sequence of any of the sequences of the polypeptide of Table A2 to A26 and further preferably conferring enhanced yield-related traits relative to control plants.
[0170] (iii) derivatives of any of the amino acid sequences given in (i) or (ii) above.

[0171] Nucleic acid variants may also be useful in practising the methods of the invention. Examples of such variants include nucleic acids encoding homologues and derivatives of any one of the amino acid sequences given in Table A of the Examples section, the terms “homologue” and “derivative” being as defined herein. Also useful in the methods of the invention are nucleic acids encoding homologues and derivatives of orthologues or paralogues of any one of the amino acid sequences given in Table A of the Examples section. Homologues and derivatives useful in the methods of the present invention have substantially the same biological and functional activity as the unmodified protein from which they are derived. Further variants useful in practising the methods of the invention are variants in which codon usage is optimised or in which miRNA target sites are removed.

[0172] Further nucleic acid variants useful in practising the methods of the invention include portions of nucleic acids encoding iSYT-like polypeptides, nucleic acids hybridising to nucleic acids encoding iSYT-like polypeptides, splice variants of nucleic acids encoding iSYT-like polypeptides, allelic variants of nucleic acids encoding iSYT-like polypeptides and variants of nucleic acids encoding iSYT-like polypeptides obtained by gene shuffling. The terms hybridising sequence, splice variant, allelic variant and gene shuffling are as described herein.

[0173] Nucleic acids encoding iSYT-LIKE polypeptides need not be full-length nucleic acids, since performance of the methods of the invention does not rely on the use of full-length nucleic acid sequences. According to the present invention, there is provided a method for enhancing yield-related traits in plants, comprising introducing and expressing in a plant a portion of any one of the nucleic acid sequences given in Table A of the Examples section, or a portion of a nucleic acid encoding an orthologue, paralogue or homologue of any of the amino acid sequences given in Table A of the Examples section wherein the nucleic acid encodes two or three iSYT polypeptides.

[0174] A portion of a nucleic acid may be prepared, for example, by making one or more deletions to the nucleic acid. The portions may be used in isolated form or they may be fused to other coding (or non-coding) sequences in order to, for example, produce a protein that combines several activities. When fused to other coding sequences, the resultant polypeptide produced upon translation may be bigger than that predicted for the protein portion.

[0175] Portions useful in the methods of the invention, encode a iSYT-like polypeptide as defined herein, and have substantially the same biological activity as the amino acid sequences given in Table A of the Examples section. Preferably, the portion is a portion of any one of the nucleic acids given in Table A of the Examples section, or is a portion of a nucleic acid encoding an orthologue or paralogue of any one of the amino acid sequences given in Table A of the Examples section. Preferably the portion is at least 100, 200, 300, 400, 500, 550, 600, 650, 700, 750, 800, 850, 900, 950, 1000 consecutive nucleotides in length, the consecutive nucleotides being of any one of the nucleic acid sequences given in Table A of the Examples section, or of a nucleic acid encoding an orthologue or paralogue of any one of the amino acid sequences given in Table A of the Examples section. Most preferably the portion is a portion of the nucleic acid of SEQ ID NO: 1.

[0176] Another nucleic acid variant useful in the methods of the invention is a nucleic acid capable of hybridising, under reduced stringency conditions, preferably under stringent conditions, with a nucleic acid encoding a iSYT-LIKE polypeptide as defined herein, or with a portion as defined herein.

[0177] Hybridising sequences useful in the methods of the invention encode an iSYT-LIKE polypeptide as defined herein, having substantially the same biological activity as the amino acid sequences given in Table A of the Examples section. Preferably, the hybridising sequence is capable of hybridising to the complement of any one of the nucleic acids given in Table A of the Examples section, or to a portion of any of these sequences, a portion being as defined above, or the hybridising sequence is capable of hybridising to the complement of a nucleic acid encoding an orthologue or paralogue of any one of the amino acid sequences given in Table A of the Examples section. Most preferably, the hybridising sequence is capable of hybridising to the complement of a nucleic acid encoding any of the polypeptide of Table A and Table A2 to A6.

[0178] Another nucleic acid variant useful in the methods of the invention is a splice variant encoding a iSYT-LIKE polypeptide as defined hereinabove, a splice variant being as defined herein.

[0179] According to the present invention, there is provided a method for enhancing yield-related traits in plants, comprising introducing and expressing in a plant a splice variant of two or three nucleic acid sequences given in Table A or Tables A2 to A26 of the Examples section, or a splice variant of a nucleic acid encoding an orthologue, paralogue or homologue of any of the amino acid sequences given in Table A of the Examples section.

[0180] Another nucleic acid variant useful in performing the methods of the invention is an allelic variant of a nucleic acid encoding an iSYT-LIKE polypeptide as defined hereinabove, an allelic variant being as defined herein.

[0181] According to the present invention, there is provided a method for enhancing yield-related traits in plants, comprising introducing and expressing in a plant of two or three allelic variant of any one of the nucleic acids given in Table A or Tables A2 to A26 of the Examples section, or comprising introducing and expressing in a plant an allelic variant of a nucleic acid encoding an orthologue, paralogue or homologue of any of the amino acid sequences given in Table A of the Examples section.

[0182] Gene shuffling or directed evolution may also be used to generate variants of nucleic acids encoding iSYT-LIKE polypeptides as defined above; the term “gene shuffling” being as defined herein.

[0183] According to the present invention, there is provided a method for enhancing yield-related traits in plants, comprising introducing and expressing in a plant a variant of any one of the nucleic acid sequences given in Table A or Tables A2 to A26 of the Examples section, or comprising introducing and expressing in a plant a variant of a nucleic acid encoding two or three orthologue, paralogue or homologue of any of the amino acid sequences given in Table A or Tables A2 to A26 of the Examples section, which variant nucleic acid is obtained by gene shuffling.

[0184] Furthermore, nucleic acid variants may also be obtained by site-directed mutagenesis. Several methods are available to achieve site-directed mutagenesis, the most common being PCR based methods (Current Protocols in Molecular Biology. Wiley Eds.).

[0185] Nucleic acids encoding iSYT-like polypeptides may be derived from any natural or artificial source. The nucleic acid may be modified from its native form in composition and/or genomic environment through deliberate human manipulation. Preferably the iSYT-LIKE polypeptide-encoding nucleic acid is from a plant, further preferably from a monocotyledonous plant, most preferably the nucleic acid is from zea mays or from Oryza sativa.

[0186] Performance of the methods of the invention gives plants having enhanced yield-related traits. In particular performance of the methods of the invention gives plants having increased yield, especially increased seed yield relative to control plants. The terms “yield” and “seed yield” are described in more detail in the “definitions” section herein.

[0187] Reference herein to enhanced yield-related traits is taken to mean an increase early vigour and/or in biomass (weight) of one or more parts of a plant, which may include aboveground (harvestable) parts and/or (harvestable) parts below ground. In particular, such harvestable parts are seeds, and performance of the methods of the invention results in plants having increased seed yield relative to the seed yield of control plants.

[0188] A preferred method for modulating (increasing or decreasing) expression of any two or three nucleic acids encoding the corresponding two or three iSYT-like polypeptides is by introducing and expressing in a plant: (i) a nucleic acid sequence encoding a first iSYT-like polypeptide; and (ii) a nucleic acid sequence encoding a second iSYT-like polypeptide. Therefore, according to the present invention, there is provided a method for enhancing yield-related traits in plants, which method comprises introducing and expressing in a plant:
[0189] (i) any two or three nucleic acids encoding the corresponding two or three iSYT-like polypeptides; or
[0190] (ii) two or three nucleic acids, each encoding a single iSYT-like polypeptide; or
[0191] (iii) a nucleic acid according to (i) and a nucleic according to (ii),
   wherein said iSYT-like polypeptide is selected from the group consisting of any of the polypeptides of Table A, homologues thereof and fusions of the same.

[0192] Methods for introducing and expressing two or more transgenes (also called gene stacking) in transgenic plants are well known in the art (see for example, a review by Halpin (2005) Plant Biotech J (3): 141-155. Gene stacking can proceed by interative steps, where two or more transgenes can be sequentially introduced into a plant by crossing a plant containing one transgene with individuals harbouring other transgenes or, alternatively, by re-transforming (or super-transforming) a plant containing one transgene with new genes.

[0193] According to the present invention, there is provided a method for enhancing yield-related traits in plants, which method comprises sequentially introducing and expressing in a plant:
[0194] (i) any two or three nucleic acids encoding the corresponding two or three iSYT-like polypeptides; or
[0195] (ii) two or three nucleic acids, each encoding a single iSYT-like polypeptide; or
[0196] (iii) a nucleic acid according to (i) and a nucleic according to (ii), wherein said iSYT-like polypeptide is selected from the group consisting of any of the polypeptides of Table A, homologues thereof and fusions of the same.

[0197] Preferably, the nucleic acid sequences of (i), (ii) and (iii) are sequentially introduced and expressed by crossing. A crossing is performed between a female parent plant comprising an introduced and expressed isolated nucleic acid sequence encoding one or two iSYT-like polypeptides, and a male parent plant also comprising an introduced and expressed isolated nucleic acid sequence encoding one or two iSYT-like polypeptides, and preferably selecting in the progeny for the presence and expression of both transgenes. Therefore, according to the present invention, there is provided a method for enhancing yield-related traits in plants, by crossing a female parent plant comprising an introduced and expressed isolated nucleic acid sequence encoding one or two iSYT-like polypeptides, and a male parent plant comprising an introduced and expressed isolated nucleic acid sequence encoding one or two iSYT-like polypeptides, and preferably selecting in the progeny for the presence and expression of at least two of the introduced transgenes encoding the corresponding iSYT-like polypeptides, wherein said plants have enhanced yield-related traits relative to the parent plants, or to any other control plants as defined herein.

[0198] Alternatively the nucleic acid sequences of (i), (ii) and (iii) are sequentially introduced and expressed by re-transformation. Re-transformation is performed by introducing and expressing a nucleic acid sequence encoding one or two iSYT-like polypeptides, plant part, or plant cell comprising a introduced and expressed nucleic acid sequence encoding a second one or two iSYT-like polypeptides, and preferably by selecting in the progeny for the presence and expression of both transgenes. Therefore, according to the present invention, there is provided a method for enhancing yield-related traits in plants, by re-transformation performed by introducing and expressing a nucleic acid sequence encoding one or two iSYT-like polypeptides into a plant, plant part, or plant cell comprising an introduced and expressed nucleic acid sequence encoding a second one or two iSYT-like polypeptide, and by preferably selecting in the progeny for the presence and expression of both transgenes, wherein said plants have enhanced yield-related traits relative to the plants having increased expression of one of:
[0199] (i) any two or three nucleic acids encoding the corresponding two or three iSYT-like polypeptides; or
[0200] (ii) two or three nucleic acids, each encoding a single iSYT-like polypeptide; or
[0201] (iii) a nucleic acid according to (i) and a nucleic according to (ii),
   wherein said iSYT-like polypeptide is selected from the group consisting of any of the polypeptides of Table A, homologues thereof and fusions of the same.

[0202] Alternatively, gene stacking can occur via simultaneous transformation, or co-transformation, which is faster and can be used in a whole range of well known transformation techniques, preferably as described herein.

[0203] Alternatively, gene stacking can occur via simultaneous transformation, or co-transformation, which is faster and can be used in a whole range of transformation techniques, as described in the “definition” section herein.

[0204] When direct genetic transformation is considered, using physical or chemical delivery systems (e.g., microprojectile bombardment, PEG, electroporation, liposome, glass needles, etc.), the transgenes (at least two) can also be present in a number of conformations, but essentially do not need to be comprised in a vector capable of being replicated in Agrobacteria or viruses, intermediates of the genetic transformation. The two transgenes can be comprised in one or more nucleic acid molecules, but simultaneously used for the genetic transformation process.

[0205] According to the present invention, there is provided a method for enhancing yield-related traits in plants, which method comprises simultaneously introducing and expressing in a plant: (i) a nucleic acid sequence encoding one or two iSYT-like polypeptides; and (ii) a nucleic acid sequence encoding a second iSYT-like polypeptide, which plants have enhanced yield-related traits relative to plants having increased expression of one of:
[0206] (i) any two or three nucleic acids encoding the corresponding two or three iSYT-like polypeptides; or
[0207] (ii) two or three nucleic acids, each encoding a single iSYT-like polypeptide; or
[0208] (iii) a nucleic acid according to (i) and a nucleic according to (ii),
   wherein said iSYT-like polypeptide is selected from the group consisting of any of the polypeptides of Table A, homologues thereof and fusions of the same.

[0209] The nucleic acid sequences of (i), (ii) and (iii) that are simultaneously introduced and expressed, are comprised in one or more nucleic acid molecules. Therefore, according to the present invention is provided increasing yield-related traits in plants, which method comprises simultaneously introducing and expressing in a plant:
[0210] (i) any two or three nucleic acids encoding the corresponding two or three iSYT-like polypeptides; or
[0211] (ii) two or three nucleic acids, each encoding a single iSYT-like polypeptide; or
[0212] (iii) a nucleic acid according to (i) and a nucleic according to (ii),
   wherein said iSYT-like polypeptide is selected from the group consisting of any of the polypeptides of Table A, homologues thereof and fusions of the same.

[0213] The invention also provides genetic constructs and vectors to facilitate introduction and/or expression (de novo introduced or increased the already existing expression) in plants of any two or three nucleic acids encoding the corresponding combination of two or three iSYT-like polypeptides. The gene constructs may be inserted into vectors, which may be commercially available, suitable for transforming into plants and for expression of the gene of interest in the transformed cells. The invention also provides use of a gene construct as defined herein in the methods of the invention.

[0214] More specifically, the present invention provides a construct comprising:
[0215] (a) any two or three nucleic acids encoding the corresponding two or three iSYT-like polypeptides as defined above;
[0216] (b) one or more control sequences capable of increasing expression of the nucleic acid sequence of (a) and of (b); and optionally
[0217] (c) a transcription termination sequence.

[0218] The nucleic acid sequence of (a) is preferably a nucleic acid molecule comprising a nucleic acid sequence encoding combinations of two or three iSYT-like polypeptides, preferably those combinations listed in Table 3. The nucleic acid sequences encoding the iSYT polypeptides in maybe fused to each other or separated by coding or non-coding DNA, such as promoters, introns, subcellular targeting signal, or stuffed DNA such as the MARs (Matrix attachment Regions) regions.

[0219] The term “control sequence” and “termination sequence” are as defined herein. Preferred control sequence of a construct useful in the methods of the invention are provided in Table 4, preferably as represented by SEQ ID NO: 665 to SEQ ID NO: 669.

[0220] Preferably, one of the control sequences of a construct is a constitutive promoter. An example of a constitutive promoter is a GOS2 promoter, preferably a rice GOS2 promoter, more preferably a GOS2 promoter as represented by SEQ ID NO: 664.

TABLE 4
Preferred promoters

| | | SEQ ID |
|---|---|---|
| Promoter name | Source organism | NO |
| GOS2 | Oryza sativa | 665 |
| HMGB | Oryza sativa | 666 |
| ScBV | Sugarcane bacilliform virus | 667 |
| ScBV-METI | Sugarcane bacilliform virus with intron | 668 |
| ZmUBI | Zea mays | 669 |

[0221] In one preferred construct, a single control sequence is used to drive the expression of the nucleic acid sequence encoding two or three iSYT-like polypeptides, preferably those combinations as listed in Table 3.

[0222] The present invention also provides for a mixture of constructs useful for example, for simultaneous introduction and expression in plants of two or three nucleic acid sequence encoding an iSYT-like polypeptide as defined above; wherein at least one construct comprises:
[0223] (a) a nucleic acid sequence nucleic acid sequence encoding an iSYT-like polypeptide as defined above;
[0224] (b) one or more control sequences capable of driving expression of the nucleic acid sequence of (a); and optionally
[0225] (c) a transcription termination sequence,
   and wherein at least one other construct comprises:
[0226] (d) a nucleic acid sequence nucleic acid sequence encoding an iSYT-like polypeptide as defined above;
[0227] (e) one or more control sequences capable of driving expression of the nucleic acid sequence of (d); and optionally
[0228] (f) a transcription termination sequence.

[0229] Preferably, one of the control sequences of a construct is a constitutive promoter. An example of a constitutive promoter is a GOS2 promoter, preferably a rice GOS2 promoter, more preferably a GOS2 promoter as represented by SEQ ID NO: 664

[0230] The invention also provides for the use of a construct comprising: (a) any two or three nucleic acids encoding the corresponding two or three iSYT-like polypeptides as defined above, or of a mixture of constructs as described above, in a method for making plants having enhanced yield-related traits relative to plants having increased expression of one of the nucleic acids encoding the corresponding two or three iSYT-like polypeptides which increased yield-related traits are one or more of: (i) increased early vigour; (ii) increased aboveground biomass or root biomass; (iii) increased total seed yield per plant; (iv) increased seed filling rate; (v) increased number of (filled) seeds; (vi) increased harvest index; or (vii) increased thousand kernel weight (TKW).

[0231] The invention also provides for plants, plant parts or plant cells transformed with a construct comprising any two or three nucleic acids encoding the corresponding two or three iSYT-like polypeptides as defined above or with a mixture of constructs as defined above.

[0232] Plants are transformed with one or more vectors comprising any of the nucleic acid sequences described above. The skilled artisan is well aware of the genetic elements that must be present on the vector in order to successfully transform, select and propagate host cells containing the sequence of interest. The sequence of interest is operably linked to one or more control sequences (at least to a promoter).

[0233] Advantageously, any type of promoter, whether natural or synthetic, may be used to increase expression of the nucleic acid sequence. A constitutive promoter is particularly useful in the methods.

[0234] Other organ-specific promoters, for example for preferred expression in leaves, stems, tubers, meristems, seeds (embryo and/or endosperm), are useful in performing the methods of the invention. See the “Definitions” section herein for definitions of the various promoter types.

[0235] The present invention provides a method for enhancing yield-related traits especially seed yield of plants, relative to control plants, which method comprises modulating expression in a plant of a nucleic acid encoding a iSYT-LIKE polypeptide as defined herein.

[0236] Since the transgenic plants according to the present invention have increased yield (yield related traits), it is likely that these plants exhibit an increased growth rate (during at least part of their life cycle), relative to the growth rate of control plants at a corresponding stage in their life cycle.

[0237] According to a preferred feature of the present invention, performance of the methods of the invention gives plants having an increased growth rate relative to control plants. Therefore, according to the present invention, there is provided a method for increasing the growth rate of plants, which method comprises modulating expression in a plant of a nucleic acid encoding a iSYT-like polypeptide as defined herein.

[0238] Performance of the methods of the invention gives plants grown under non-stress conditions or under mild drought conditions increased yield relative to control plants grown under comparable conditions. Therefore, according to the present invention, there is provided a method for increasing yield in plants grown under non-stress conditions or under mild drought conditions, which method comprises modulating expression in a plant of a nucleic acid encoding an iSYT-like polypeptide.

[0239] Performance of the methods of the invention gives plants grown under conditions of nutrient deficiency, particularly under conditions of nitrogen deficiency, increased yield relative to control plants grown under comparable conditions. Therefore, according to the present invention, there is provided a method for increasing yield in plants grown under conditions of nutrient deficiency, which method comprises modulating expression in a plant of a nucleic acid encoding an iSYT-like polypeptide.

[0240] Performance of the methods of the invention gives plants grown under conditions of salt stress, increased yield relative to control plants grown under comparable conditions. Therefore, according to the present invention, there is provided a method for increasing yield in plants grown under conditions of salt stress, which method comprises modulating expression in a plant of a nucleic acid encoding an iSYT-Like polypeptide.

[0241] The invention also provides genetic constructs and vectors to facilitate introduction and/or expression in plants of nucleic acids encoding iSYT-Like polypeptides. The gene constructs may be inserted into vectors, which may be commercially available, suitable for transforming into plants and suitable for expression of the gene of interest in the transformed cells. The invention also provides use of a gene construct as defined herein in the methods of the invention.

[0242] As mentioned above, a preferred method for modulating expression of a nucleic acid encoding a iSYT-Like polypeptide is by introducing and expressing in a plant a nucleic acid encoding a iSYT-Like polypeptide; however the effects of performing the method, i.e. enhancing yield-related traits may also be achieved using other well known techniques, including but not limited to T-DNA activation tagging, TILLING, homologous recombination. A description of these techniques is provided in the definitions section.

[0243] The present invention clearly extends to any plant cell or plant produced by any of the methods described herein, and to all plant parts and propagules thereof. The present invention encompasses plants or parts thereof (including seeds) obtainable by the methods according to the present invention. The plants or parts thereof comprise a nucleic acid transgene encoding a iSYT-Like polypeptide as defined above. The present invention extends further to encompass the progeny of a primary transformed or transfected cell, tissue, organ or whole plant that has been produced by any of the aforementioned methods, the only requirement being that progeny exhibit the same genotypic and/or phenotypic characteristic(s) as those produced by the parent in the methods according to the invention.

[0244] The invention also includes host cells containing an isolated nucleic acid encoding an iSYT-like polypeptide as defined hereinabove. Preferred host cells according to the invention are plant cells. Host plants for the nucleic acids or the vector used in the method according to the invention, the expression cassette or construct or vector are, in principle, advantageously all plants, which are capable of synthesizing the polypeptides used in the inventive method.

[0245] The methods of the invention are advantageously applicable to any plant. Plants that are particularly useful in the methods of the invention include all plants which belong to the superfamily Viridiplantae, in particular monocotyledonous and dicotyledonous plants including fodder or forage legumes, ornamental plants, food crops, trees or shrubs. According to a preferred embodiment of the present invention, the plant is a crop plant. Examples of crop plants include soybean, sunflower, canola, alfalfa, rapeseed, linseed, cotton, tomato, potato and tobacco. Further preferably, the plant is a monocotyledonous plant. Examples of monocotyledonous plants include sugarcane. More preferably the plant is a cereal. Examples of cereals include rice, maize, wheat, barley, millet, rye, triticale, sorghum, emmer, spelt, secale, einkorn, teff, milo and oats.

[0246] The invention also extends to harvestable parts of a plant such as, but not limited to seeds, leaves, fruits, flowers, stems, roots, rhizomes, tubers and bulbs, which harvestable parts comprise a recombinant nucleic acid encoding an iSYT-like polypeptide. The invention furthermore relates to products derived, preferably directly derived, from a harvestable part of such a plant, such as dry pellets or powders, oil, fat and fatty acids, starch or proteins.

[0247] The present invention also encompasses use of nucleic acids encoding iSYT-like polypeptides as described herein and use of these iSYT-like polypeptides in enhancing any of the aforementioned yield-related traits in plants. For example, nucleic acids encoding iSYT-like polypeptide described herein, or the iSYT-like polypeptides themselves, may find use in breeding programmes in which a DNA marker is identified which may be genetically linked to a iSYT-like polypeptide-encoding gene. The nucleic acids/genes, or the iSYT-like polypeptides themselves may be used to define a molecular marker. This DNA or protein marker may then be used in breeding programmes to select plants having enhanced yield-related traits as defined hereinabove in the methods of the invention. Furthermore, allelic variants of a iSYT-like polypeptide-encoding nucleic acid/gene may find use in marker-assisted breeding programmes. Nucleic acids encoding iSYT-like polypeptides may also be used as probes for genetically and physically mapping the genes that they are a part of, and as markers for traits linked to those genes. Such information may be useful in plant breeding in order to develop lines with desired phenotypes.

### Items

[0248] The present invention will now be described in reference to the embodiments of the following items:
[0249] 1. A method for enhancing yield-related traits in a plant relative to control plants, comprising modulating expression in a plant of:
   [0250] (i) any two or three nucleic acids encoding the corresponding two or three iSYT-like polypeptides; or
   [0251] (ii) two or three nucleic acids, each encoding a single iSYT-like polypeptide; or
   [0252] (iii) a nucleic acid according to (i) and a nucleic according to (ii),
   [0253] wherein said iSYT-like polypeptide is selected from the group consisting of any of the polypeptides of Table A, homologues thereof and fusions of the same.
[0254] 2. A method according to item 1 wherein at least one of the polypeptides is a synovial sarcoma translocation (SYT) polypeptide or a homologue thereof, said SYT polypeptide or homologue thereof preferably comprising an SNH domain having in increasing order of preference at least 40%, 45%, 50%, 55%, 60%, 65%, 70%, 75%, 80%, 85%, 90%, 91%, 92%, 93%, 94%, 95%, 96%, 97%, 98%, 99% sequence identity to the SNH domain of SEQ ID NO: 670 (IQQYLDENKSLILKIVESQNSGKLSECAENQARLQRNL MYLAAIAD).
[0255] 3. A method according to item 1 or 2 wherein said nucleic acids encode the corresponding polypeptides selected from the group consisting of the polypeptides listed in Table 3.
[0256] 4. Method according to any one of items 1 to 3, wherein said modulated expression is effected by introducing and expressing in a plant said nucleic acids.
[0257] 5. Method according to any one of items 1 to 4, wherein said nucleic acids is selected from the group consisting of the nucleic acids encoding any the proteins listed in Table A and Tables A2 to Table A26, or is a portion of such a nucleic acid, or a nucleic acid capable of hybridising with such a nucleic acid.
[0258] 6. Method according to any one of items 1 to 5, wherein said nucleic acids encode an orthologue or paralogue of any of the proteins given in Table A.
[0259] 7. Method according to any preceding item, wherein said enhanced yield-related traits comprise increased yield, preferably increased biomass and/or increased seed yield relative to control plants.
[0260] 8. Method according to any preceding item, wherein said enhanced yield-related traits are obtained under non-stress conditions.
[0261] 9. Method according to any preceding item, wherein said enhanced yield-related traits are obtained under conditions of drought stress, salt stress or nitrogen deficiency.
[0262] 10. Method according to any one of items 4 to 9, wherein said one or more said nucleic acids are operably linked to a plant promoter, preferably to a constitutive promoter, more preferably to a GOS2 promoter, most preferably to a GOS2 promoter from rice.
[0263] 11. Method according to any one of items 1 to 10, wherein said one or more said nucleic acids is of plant origin, preferably from a dicotyledonous plant, further preferably from the family Brassicaceae, more preferably from the genus Arabidopsis, most preferably from Arabidopsis thaliana.
[0264] 12. Plant or part thereof, including seeds, obtainable by a method according to any one of items 1 to 11, wherein said plant or part thereof comprises any two or three nucleic acids encoding the corresponding two or three polypeptides selected from the group consisting of the polypeptides listed in Table A, homologues thereof and fusions of the same.
[0265] 13. Construct comprising:
   [0266] (i) Any two or three nucleic acids encoding the corresponding two or three polypeptides selected from the group consisting of any of the polypeptides listed in of Table A or homologues thereof and fusions of the same;
   [0267] (ii) one or more control sequences capable of driving expression of the nucleic acid sequence of (i), preferably a plant promoter, more preferably a constitutive promoter, even more preferably a GOS2 promoter, most preferably a GOS2 promoter from rice; and optionally
   [0268] (iii) a transcription termination sequence.
[0269] 14. Construct according to item 12, wherein said nuclec acid of (i) encodes two or three polypeptides selected from the group consisting of the polypeptides listed in Table 3.
[0270] 15. Use of a construct according to item 13 or 14 in a method for making plants having increased yield, particularly increased biomass and/or increased seed yield relative to control plants.
[0271] 16. Plant, plant part or plant cell transformed with a construct according to item 13 or 14.
[0272] 17. Method for the production of a transgenic plant having increased yield, particularly increased biomass and/or increased seed yield relative to control plants, comprising:
   [0273] (i) introducing and expressing in a plant any two or three nucleic acids encoding the corresponding polypeptides selected from the group consisting of any of the polypeptides of Table A or homologues thereof and fusions of the same; and
   [0274] (ii) cultivating the plant cell under conditions promoting plant growth and development.
[0275] 18. Transgenic plant having increased yield, particularly increased biomass and/or increased seed yield, relative to control plants, resulting from modulated expression of any two or three nucleic acids encoding the corresponding polypeptides selected from the group consisting of any of the polypeptides of Table A or homologues thereof and fusions of the same, or a transgenic plant cell derived from said transgenic plant.
[0276] 19. Transgenic plant according to item 12, 16 or 18, or a transgenic plant cell derived thereof, wherein said plant is a crop plant or a monocot or a cereal, such as rice, maize, wheat, barley, millet, rye, triticale, sorghum emmer, spelt, secale, einkorn, teff, milo and oats.
[0277] 20. Harvestable parts of a plant according to item 19, wherein said harvestable parts are preferably shoot biomass and/or seeds.
[0278] 21. Products derived from a plant according to item 18 or 19 and/or from harvestable parts of a plant according to item 20.
[0279] 22. Construct according to item 12, wherein said nuclec acid of (i) encodes two polypeptides selected from the group consisting of the combinations of Table 3.
[0280] 23. Use of a construct according to item 13 or 14 in a method for making plants having increased yield, particularly increased biomass and/or increased seed yield relative to control plants.
[0281] 24. Plant, plant part or plant cell transformed with a construct according to item 13 or 14.
[0282] 25. Method for the production of a transgenic plant having increased yield, particularly increased biomass and/or increased seed yield relative to control plants, comprising:
   [0283] (iii) introducing and expressing in a plant one or more (isolated) nucleic acids encoding at least one, preferably two, three, four, five, six, seven, eight, nine, ten or more polypeptides selected from the group consisting of any of the polypeptides of Table A, homologues thereof and fusions of the same; and
   [0284] (iv) cultivating the plant cell under conditions promoting plant growth and development.
[0285] 26. Transgenic plant having increased yield, particularly increased biomass and/or increased seed yield, relative to control plants, resulting from modulated expression of one or more (isolated) nucleic acids encoding at least one, preferably two, three, four, five, six, seven, eight, nine, ten or more polypeptides selected from the group consisting of any of the polypeptides of Table A, homologues thereof and fusions of the same, or a transgenic plant cell derived from said transgenic plant.
[0286] 27. Transgenic plant according to item 12, 16 or 18, or a transgenic plant cell derived thereof, wherein said plant is a crop plant or a monocot or a cereal, such as rice, maize, wheat, barley, millet, rye, triticale, sorghum emmer, spelt, secale, einkorn, teff, milo and oats.
[0287] 28. Harvestable parts of a plant according to item 19, wherein said harvestable parts are preferably shoot biomass and/or seeds.
[0288] 29. Products derived from a plant according to item 18 or 19 and/or from harvestable parts of a plant according to item 20.
[0289] 30. Use of any two or three nucleic acids encoding two or three polypeptides selected from the group consisting of any of the polypeptides of Table A, homologues thereof and fusions of the same in increasing yield, particularly in increasing seed yield and/or shoot biomass in plants, relative to control plants.
[0290] 31. An isolated AN3-based protein complex, comprising at least the proteins AN3p and one or more of the proteins selected from the group encoded by AT4G16143, AT1G09270, AT3G06720, AT5G53480, AT3G60830, AT1G18450, AT2G46020, AT2G28290, AT1G21700, AT5G14170, AT4G17330, AT4G27550, AT1G65980, AT5G55210, AT3G15000, AT4G35550, AT1G20670, AT1G08730, AT5G13030, AT2G18876, AT5G17510, AT1G05370, AT4G21540, AT1G23900 and AT5G23690.
[0291] 32. An isolated AN3-based protein complex comprises at least the proteins AN3p and one or more proteins selected from the group consisting of ARP4 (AT1G18450), ARP7 (AT3G60830), SNF2 (AT2G46020), SYD (AT2G28290), SWI3C (AT1G21700) and SWP73B (AT5G14170).
[0292] 33. An isolated AN3-based protein complex according to item 2, whereby said protein complex comprises at least AN3p, an actin related protein selected from the group consisting of ARP4 and ARP7, an ATPase selected from the group consisting of SNF2 (BRM) and SYD and a SWIRM domain containing protein.
[0293] 34. An isolated AN3-based protein complex according to item 3, whereby said SWIRM domain containing protein is SWI3C
[0294] 35. The use of a protein complex according to any of the preceding items to promote plant growth.
[0295] 36. A method to promote AN3-based protein complex formation by simultaneous overexpression of at least two proteins of the complex.

### DESCRIPTION OF FIGURES

[0296] The present invention will now be described with reference to the following figures in which:

[0297] FIG. 1. Expression analysis of GS-tagged GFP and AN3 in transgenic cell suspension cultures.

[0298] The total protein extract of 2-day-old wild-type and N- and C-terminal GS-tagged GFP and AN3 overexpressing cultures (60 μg) was separated by 12% SDS-PAGE and immunoblotted. For detection of GS-tagged proteins, blots were incubated with human blood plasma followed by incubation with anti-human IgG coupled to horseradish peroxidase. Protein gel blots were developed by Chemiluminiscent detection. The expected recombinant molecular masses for GS-tagged GFP and AN3 are 52.8 kDa and 43.5 kDa, respectively (indicated with a black dot).

[0299] FIG. 2. Analysis of the TAP protein eluates.

[0300] GS-tagged protein complexes were purified from transgenic plant cell suspension cultures, precipitated with TCA (25%, v/v), separated on 4-12% NuPAGE gels, and visualized with colloidal Coomassie G-250 staining. Bait proteins are indicated with a dot.

[0301] FIG. 3. represents the binary vector used for introducing and expressing in Oryza sativa of a iSYT-Like-encoding nucleic acid under the control of a plant promoter.

### EXAMPLES

[0302] The present invention will now be described with reference to the following examples, which are by way of illustration alone. The following examples are not intended to completely define or otherwise limit the scope of the invention.

[0303] DNA manipulation: unless otherwise stated, recombinant DNA techniques are performed according to standard protocols described in (Sambrook (2001) Molecular Cloning: a laboratory manual, 3rd Edition Cold Spring Harbor Laboratory Press, CSH, New York) or in Volumes 1 and 2 of Ausubel et al. (1994), Current Protocols in Molecular Biology, Current Protocols. Standard materials and methods for plant molecular work are described in Plant Molecular Biology Labfax (1993) by R. D. D. Croy, published by BIOS Scientific Publications Ltd (UK) and Blackwell Scientific Publications (UK).

### Example 1

### Vector Construction: TAP Vectors

[0304] Construction of N- and C-terminal GS-tagged GFP and AN3 under the control of the 35S (CaMV) promoter was obtained by Multisite Gateway LR reactions. The coding regions, without (−) and with (+) stopcodon, were amplified by polymerase chain reaction (PCR) and cloned into the Gateway pDONR221 vector (Invitrogen) resulting in pEntryL1L2-GFP(−), pEntryL1L2-GFP(+), pEntryL1L2-AN3(−) and pEntryL1L2-AN3(+). The Pro_{35S}:GFP-GS- and Pro_{35S}:AN3-GS-containing plant transformation vectors were obtained by Multisite Gateway LR reaction between pEntryL4R1—Pro_{35S}, pEntryL1L2-GFP(−) or pEntryL1L2-AN3(−), and pEntryR2L3-GS and the destination vector pKCTAP, respectively (Van Leene et al., 2007). To obtain the Pro35S:GS-GFP and Pro35S:GS-AN3 vectors Multisite LR recombination between pEntryL4L3-Pro_{35S} and pEntryL1 L2-GFP(+) or pEntryL1L2-AN3(+) with pKNGSTAP occurred.

[0305] All entry and destination vectors were checked by sequence analysis. Expression vectors were transformed to Agrobacterium tumefaciens strain C58C1Rif^{R} (pMP90) by electroporation. Transformed bacteria were selected on yeast extract broth plates containing 100 μg/mL rifampicin, 40 μg/mL gentamicin, and 100 μg/mL spectinomycin.

### Example 2

### Cell Suspension Cultivation

[0306] Wild-type and transgenic Arabidopsis thaliana cell suspension PSB-D cultures were maintained in 50 mL MSMO medium (4.43 g/L MSMO, Sigma-Aldrich), 30 g/L sucrose, 0.5 mg/L NAA, 0.05 mg/L kinetin, pH 5.7 adjusted with 1M KOH) at 25° C. in the dark, by gentle agitation (130 rpm). Every 7 days the cells were subcultured in fresh medium at a 1/10 dilution.

### Example 3

### Cell Culture Transformation

[0307] The Arabidopsis culture was transformed by Agrobacterium co-cultivation as described previously (Van Leene et al., 2007). The Agrobacterium culture exponentially growing in YEB (OD₆₀₀ between 1.0 and 1.5) was washed three times by centrifugation (10 min at 5000 rpm) with an equal volume MSMO medium and resuspended in cell suspension growing medium until an OD₆₀₀ of 1.0. Two days after subcultivation, 3 mL suspension culture was incubated with 200 μL washed Agrobacteria and 200 μM acetoseringone, for 48 h in the dark at 25° C. with gentle agitation (130 rpm). Two days after co-cultivation, 7 mL MSMO containing a mix of three antibiotics (25 μg/mL kanamycin, 500 μg/mL carbenicellin, and 500 μg/mL vancomycin) was added to the cell cultures and grown further in suspension under standard conditions (25° C., 130 rpm and continuous darkness). The stable transgenic cultures were selected by sequentional dilution in a 1:5 and 1:10 ratio in 50 mL fresh MSMO medium containing the antibiotics mix, respectively at 11, and 18 days post co-cultivation. After counter selecting the bacteria, the transgenic plant cells were further subcultured weekly in a 1:5 ratio in 50 mL MSMO medium containing 25 μg/mL kanamycin for two more weeks. Thereafter the cells were weekly subcultured in fresh medium at a 1/10 dilution.

### Example 4

### Expression Analysis of Cell Suspension Cultures

[0308] Transgene expression was analyzed in a total protein extract derived from exponentially growing cells, harvested two days after subculturing. Equal amounts of total protein were separated on 12% SDS-PAGE gels and blotted onto Immobilon-P membranes (Millipore, Bedford, Mass.). Protein gel blots were blocked in 3% skim milk in 20 mM Tris-HCl, pH 7.4, 150 mM NaCl, and 0.1% Triton X-100. For detection of GS-tagged proteins, blots were incubated with human blood plasma followed by incubation with anti-human IgG coupled to horseradish peroxidase (HRP; GE-Healthcare). Protein gel blots were developed by Chemiluminiscent detection (Perkin Elmer, Norwalk, Conn.).

### Example 5

### Protein Extract Preparation

[0309] Cell material (15 g) was grinded to homogeneity in liquid nitrogen. Crude protein extract were prepared in an equal volume (w/v) of extraction buffer (25 mM Tris-HCl, pH 7.6, 15 mM MgCl₂, 5 mM EGTA, 150 mM NaCl, 15 mM p-nitrophenylphosphate, 60 mM β-glycerophosphate, 0.1% (v/v) Nonidet P-40 (NP-40), 0.1 mM sodium vanadate, 1 mM NaF, 1 mM DTT, 1 mM PMSF, 10 μg/mL leupeptin, 10 μg/mL aprotinin, 5 μg/mL antipain, 5 μg/mL chymostatin, 5 μg/mL pepstatin, 10 μg/mL soybean trypsin inhibitor, 0.1 mM benzamidine, 1 μM trans-epoxysuccinyl-L-leucylamido-(4-guanidino)butane (E64), 5% (v/v) ethylene glycol) using an Ultra-Turrax T25 mixer (IKA Works, Wilmington, N.C.) at 4° C. The soluble protein fraction was obtained by a two-step centrifugation at 36900 g for 20 min and at 178000 g for 45 min, at 4° C. The extract was passed through a 0.45 μm filter (Alltech, Deerfield, Ill.) and the protein content was determined with the Protein Assay kit (Bio-Rad, Hercules, Calif.).

### Example 6

### Tandem Affinity Purification

[0310] Purifications were performed as described by Bürckstümmer et al. (2006), with some modifications. Briefly, 200 mg total protein extract was incubated for 1 h at 4° C. under gentle rotation with 100 μL IgG Sepharose 6 Fast Flow Flow beads (GE-Healthcare, Little Chalfont, UK), pre-equilibrated with 3 mL extraction buffer. The IgG Sepharose beads were transferred to a 1 mL Mobicol column (MoBiTec, Goettingen, Germany) and washed with 10 mL IgG wash buffer (10 mM Tris-HCl, pH 8.0, 150 mM NaCl, 0.1% NP-40, 5% ethylene glycol) and 5 mL Tobacco (Nicotiana tabacum L.) Etch Virus (TEV) buffer (10 mM Tris-HCl, pH 8.0, 150 mM NaCl, 0.1% (v/v) NP-40, 0.5 mM EDTA, 1 mM PMSF, 1 μM E64, 5% (v/v) ethylene glycol). Bound complexes were eluted via AcTEV digest (2×1000, Invitrogen) for 1 h at 16° C. The IgG eluted fraction was incubated for 1 h at 4° C. under gentle rotation with 100 μL Streptavidin resin (Stratagene, La Jolla, Calif.), pre-equilibrated with 3 mL TEV buffer. The Streptavidin beads were packed in a Mobicol column, and washed with 10 mL TEV buffer. Bound complexes were eluted with 1 mL streptavidin elution buffer (10 mM Tris-HCl, pH 8.0, 150 mM NaCl, 0.1% (v/v) NP-40, 0.5 mM EDTA, 1 mM PMSF, 1 μM E64, 5% (v/v) ethylene glycol, 20 mM Desthiobiotin), and precipitated using TCA (25% v/v). The protein pellet was washed twice with ice-cold aceton containing 50 mM HCl, redissolved in sample buffer and separated on 4-12% gradient NuPAGE gels (Invitrogen). Proteins were visualized with colloidal Coomassie brilliant blue staining.

### Example 7

### Proteolysis and Peptide Isolation

[0311] After destaining, gel slabs were washed for 1 hour in H₂O, polypeptide disulfide bridges were reduced for 40 min in 25 mL of 6.66 mM DTT in 50 mM NH₄HCO₃ and sequentially the thiol groups were alkylated for 30 min in 25 mL 55 mM IAM in 50 mM NH₄HCO₃. After washing the gel slabs 3 times with water, complete lanes from the protein gels were cut into slices, collected in microtiter plates and treated essentially as described before with minor modifications (Van Leene et al., 2007). Per microtiterplate well, dehydrated gel particles were rehydrated in 20 μL digest buffer containing 250 ng trypsin (MS Gold; Promega, Madison, Wis.), 50 mM NH₄HCO₃ and 10% CH₃CN (v/v) for 30 min at 4° C. After adding 10 μL of a buffer containing 50 mM NH₄HCO₃ and 10% CH₃CN (v/v), proteins were digested at 37° C. for 3 hours. The resulting peptides were concentrated and desalted with microcolumn solid phase tips (PerfectPure™ C18 tip, 200 mL bed volume; Eppendorf, Hamburg, Germany) and eluted directly onto a MALDI target plate (Opti-TOF™384 Well Insert; Applied Biosystems, Foster City, Calif.) using 1.2 μL of 50% CH₃CN: 0.1% CF₃COOH solution saturated with α-cyano-4-hydroxycinnamic acid and spiked with 20 fmole/μL Glu1-Fibrinopeptide B (Sigma-Aldrich), 20 fmole/μL des-Pro2-Bradykinin (Sigma-Aldrich), and 20 fmole/μL Adrenocorticotropic Hormone Fragment 18-39 human (Sigma-Aldrich).

### Example 8

### Acquisition of Mass Spectra

[0312] A MALDI-tandem MS instrument (4800 Proteomics Analyzer; Applied Biosystems) was used to acquire peptide mass fingerprints and subsequent 1 kV CID fragmentation spectra of selected peptides. Peptide mass spectra and peptide sequence spectra were obtained using the settings essentially as presented in Van Leene et al. (2007). Each MALDI plate was calibrated according to the manufacturers' specifications. All peptide mass fingerprinting (PMF) spectra were internally calibrated with three internal standards at m/z 963.516 (des-Pro2-Bradykinin), m/z 1570.677 (Glu1-Fibrinopeptide B), and m/z 2465, 198 (Adrenocorticotropic Hormone Fragment 18-39) resulting in an average mass accuracy of 5 ppm±10 ppm for each analyzed peptide spot on the analyzed MALDI targets. Using the individual PMF spectra, up to sixteen peptides, exceeding a signal-to-noise ratio of 20 that passed through a mass exclusion filter were submitted to fragmentation analysis.

### Example 9

### MS-Based Protein Homology Identification

[0313] PMF spectra and the peptide sequence spectra of each sample were processed using the accompanied software suite (GPS Explorer 3.6, Applied Biosystems) with parameter settings essentially as described in Van Leene et al. (2007). Data search files were generated and submitted for protein homology identification by using a local database search engine (Mascot 2.1, Matrix Science). An in-house nonredundant Arabidopsis protein database called SNAPS Arabidopsis thaliana version 0.4 (SNAPS=Simple Nonredundant Assembly of Protein Sequences, 77488 sequence entries, 30468560 residues; available at http://www.ptools.ua.ac.be/snaps) was compiled from nine public databases. Protein homology identifications of the top hit (first rank) with a relative score exceeding 95% probability were retained. Additional positive identifications (second rank and more) were retained when the score exceeded the 98% probability threshold.

### Example 10

### Expression Analysis of GS-Tagged GFP and AN3 Overexpressing Cell Lines

[0314] Before performing TAP purifications stably transformed cell suspension cultures were screened on the protein expression level of the transgenes. Protein gel blotting of equal amounts of total protein extract derived from wild-type (PSB-D) cultures and GS-GFP, GFP-GS, GS-AN3, and AN3-GS overexpressing cell lines showed clear expression of the GS-tagged proteins (FIG. 1).

### Example 11

### TAP Purification of Wild-Type and GS-Tagged GFP Overexpressing Cultures

[0315] Despite the two successive purification steps performed within TAP purifications, background proteins co-purified by non-specific binding are an issue. Contaminating proteins due to experimental background were determined by purifications on wild-type and transgenic cultures overexpressing N- and C-terminal GS-tagged nuclear localized green fluorescent protein (GFP). Non-specific co-purified proteins were precipitated, separated on gel, stained (FIG. 2), trypsin digested and identified unambiguously by MALDI-TOF/TOF. Most contaminants are high abundant proteins, such as chaperones, cytoskeleton proteins, ribosomal proteins, metabolic enzymes, or protein translation factors (Table 0). Identical or similar proteins were found as common contaminants in other plant protein-protein interaction studies (Rohila et al., 2006; Van Leene et al., 2007).

### Example 12

### Tap Isolation and MS Identification of AN3 Interacting Proteins

[0316] In order to identify the interaction partners of AN3 in vivo, we performed tandem affinity (TAP) purifications on N- and C-terminal GS-fusions of AN3 ectopically expressed under control of the constitutive 35SCaMV promoter in transgenic Arabidopsis suspension cultures. Two independent TAP purifications were performed on extracts from AN3-GS and GS-AN3 lines, harvested two days after sub-culturing into fresh medium. The affinity purified proteins were separated on a 4-12% NuPAGE gel and stained with Coomassie Brilliant Blue. The purification profiles from transgenic cultures overexpressing AN3 is shown in FIG. 2. Protein bands were cut, in-gel digested with trypsin and subjected to MALDI-TOF/TOF mass spectrometry for protein identification. After substracting background proteins, identified by the control purifications described in example 2 and in other analyses (GUS and cytosolic GFP, Van Leene et al., 2007), from the obtained hit list we identified 25 AN3 interacting proteins (Table A). These can be divided into two groups: 14 proteins were confirmed experimentally and 11 proteins were identified only in one out of four TAP experiments.

### Example 13

### Isolation and Subunit Identification of AN3 Interacting SWI/SNF Chromatin Remodeling Complexes in Plants

[0317] Among the experimentally confirmed AN3 interactors six proteins act as subunits of macromolecular machines that remodel chromatin structure. A database survey (ChromDB, Gendler et al., 2008) illustrates that all of them belong to the SWI/SNF ATPase family. SWI/SNF chromatin remodeling ATPases are conserved in the animal and the plant kingdom and regulate transcriptional programs in response to endogenous and exogenous cues. This suggests that the transcriptional activity of AN3 is regulated through chromatin remodeling. In agreement, the human AN3 homolog SYT was also shown to interact with the SWI/SNF complex components BRM and Brg1 (Thaete et al., 1999; Perani et al., 2003; Ishida et al., 2004).

[0318] Although the functional role of several putative SWI/SNF complex components has been studied in Arabidopsis, so far no complete plant chromatin remodeling complex has been isolated and characterized. The co-purification with AN3 gives for the first time prove of the in vivo physical composition of plant SWI/SNF complexes which before was based solely on homology analyses and the interpretation of genetic and in vitro interactions.

[0319] A literature survey illustrates that SWI/SNF ATPase subunits control multiple developmental pathways in Arabidopsis. Null mutants of the two isolated ATPases SYD (At2g28290) and BRM (SNF2) (At2g46020) display pleiotropic developmental defects. Both mutants are slow growing and dwarfed, have defects in cotyledon separation, and exhibit reduced apical dominance (Wagner & Meyerowitz, 2002; Farrona et al., 2004; Hurtado et al., 2006; Kwon et al., 2006; Su et al., 2006). Null mutants in BRM (SNF2) also have unique root growth defects and are male sterile (Wagner & Meyerowitz, 2002; Hurtado et al., 2006; Kwon et al., 2006). Core complex Swi3c (At1g21700) mutants closely resemble brm mutants (Sarnowski et al., 2005). Mutants of the accessory components ARP4 and ARP7 display pleiotropic defects with less resemblance to the syd, brm and swi3c phenotypes (Meagher et al., 2005). Down-regulation of ARP4 resulted in phenotypes including altered organization of plant organs, early flowering, delayed flower senescence and partial sterility (Kandasamy et al., 2005a). ARP7 knockdown results in dwarfed plants with small rosette leaves, highly retarded root growth, altered flower development and reduced fertility (Kandasamy et al., 2005b). Finally, RNAi-mediated silencing of the accessory SWI/SNF complex component SWP73B (At5g14170) resulted in dwarfed plants with shorter roots (Crane & Gelvin, 2007).

### Example 14

### Isolation and Identification of AN3 Interactors

[0320] With the exception of the SWI/SNF chromatin remodeling complex subunits all other 19 identified AN3 interactors are not or poorly characterized. Table B gives an overview of there GO biological process and molecular function.

[0321] Among them four interactors (At4g16143, At1g09270, At3g06720 and At5g53480) are involved in nucleocytoplasmic trafficking which identifies AN3 as one of the targets of plant nuclear transporters. Indeed a precise cellular localization is essential for protein function and nuclear localization is a key to the function of transcription factors. In plants, nucleocytoplasmic trafficking plays a critical role in various biological processes (Meier, 2007; Xu & Meier, 2008) and nuclear transporters have been shown to be involved in regulating different signal transduction pathways during plant development (Bollman et al., 2003) and in plant responses to biotic (Palma et al., 2005) and abiotic stresses (Verslues et al., 2006).

[0322] Another AN3 interactor, that is yet not characterized, is the trehalose phosphatase/synthase 4 (TPS4). Several studies in plants imply an important role of trehalose biosynthesis for plant growth, development and stress tolerance (Grennan, 2007). In the case of Arabidopsis TPS1, knockout mutants display an embryo lethal phenotype, suggesting a role of this gene in plant development (Eastmond et al., 2002). In addition, overexpression of TPS1 shed light on its role as a regulator of glucose, abscisic acid, and stress signalling (Avonce et al., 2004). The latter study, together with a recent analysis of a rice TPS triggering abiotic stress response gene induction when overexpressed (Ge et al., 2008), suggests a possible role for TPS genes in regulating transcriptional signaling pathways.

[0323] The other identified interactors indicate links of AN3 function in multiple processes. Several studies demonstrate the involvement of sphingosine kinases in plant cell signaling (Coursol et al., 2003; Coursol et al., 2005; Worral et al., 2008), whereas reports on myosin homologues (Peremyslov et al., 2008; Jiang et al., 2007) implicate roles of protein and organelle trafficking in plant development. The connections between these genes, the other identified interactors and AN3 will be interesting to study in the future.

TABLE 0
List of co-purifying proteins during TAP experiments of untransformed cell
cultures, and of cultures ectopically expressing nuclear localized GFP

| Accession | | | |
|---|---|---|---|
| number | Protein name | Mock | GFP |
| At1g06780 | glycosyl transferase family 8 protein | | + |
| At1g07930 | elongation factor 1-alpha | | + |
| At1g09080 | luminal binding protein 3 (BiP-3) (BP3) | + | |
| At1g13440 | glyceraldehyde 3-phosphate dehydrogenase, cytosolic, | + | |
| At1g31230 | bifunctional aspartate kinase/homoserine dehydrogenase | + | |
| At1g34610 | Ulp1 protease family protein | | + |
| At1g50010 | tubulin alpha chain | | + |
| At1g61210 | WD-40 repeat family protein/katanin p80 subunit, putative | | + |
| At1g75010 | MORN repeat-containing protein | | + |
| At1g79920 | heat shock protein 70, putative | | + |
| At1g79930 | heat shock protein, putative | | + |
| At2g07620 | putative helicase | | + |
| At2g21410 | vacuolar proton ATPase, putative | + | |
| At2g26570 | expressed protein | + | |
| At3g07160 | glycosyl transferase family 48 protein | + | |
| At3g09170 | Ulp1 protease family protein | | + |
| At3g09440 | heat shock cognate 70 kDa protein 3 | | + |
| At3g11950 | ATHST; prenyltransferase | | + |
| At3g12580 | heat shock protein 70, putative | | + |
| At3g17390 | S-adenosylmethionine synthetase, putative | + | |
| At3g18530 | expressed protein | | + |
| At3g26020 | serine/threonine protein phosphatase 2A regulatory subunit B′ | + | |
| At3g42100 | AT hook motif-containing protein-related | | + |
| At3g48870 | ATP-dependent Clp protease ATP-binding subunit (ClpC) | + | |
| At3g49640 | nitrogen regulation family protein | + | |
| At3g54940 | cysteine proteinase, putative | | + |
| At4g00020 | BRCA2A (breast cancer 2 like 2A) | | + |
| At4g09800 | 40S ribosomal protein S18 | | + |
| At4g14960 | tubulin alpha chain | + | |
| At4g18080 | hypothetical protein | | + |
| At4g20160 | expressed protein | | + |
| At4g20890 | tubulin beta chain | | + |
| At4g31820 | phototropic-responsive NPH3 family protein | | + |
| At4g33200 | myosin, putative | | + |
| At5g02490 | heat shock cognate 70 kDa protein 2 | | + |
| At5g02500 | heat shock cognate 70 kDa protein 1 | | + |
| At5g08670 | ATP synthase beta chain, mitochondrial | | + |
| At5g08680 | ATP synthase beta chain, mitochondrial | | + |
| At5g08690 | ATP synthase beta chain, mitochondrial | | + |
| At5g09810 | actin 7 (ACT7)/actin 2 | + | + |
| At5g18110 | Novel cap-binding protein (nCBP) | | + |
| At5g28540 | luminal binding protein 1 (BiP-1) (BP1) | + | + |
| At5g35360 | acetyl-CoA carboxylase, biotin carboxylase subunit (CAC2) | + | |
| At5g40060 | disease resistance protein (TIR-NBS-LRR class), putative | | + |
| At5g42020 | luminal binding protein 2 (BiP-2) (BP2) | | + |
| At5g44340 | tubulin beta chain | | + |
| At5g60390 | elongation factor 1-alpha | | + |
| At5g62700 | tubulin beta chain | | + |

TABLE A
AN3 and List of AN3-copurified proteins identified by MS.

| | | | Peptide | Protein | Best ion | |
|---|---|---|---|---|---|---|
| AGI code | Description | MW (kDa) | count | score/threshold | score/threshold | |
| AT5G28640 | AN3, SYT1, SYT, GIF1 | | | | | |
| AT4G16143 | importin alpha-2, putative (IMPA2) | 49.5 | 13 | 388/61 | 84/28 | 2 |
| AT1G09270 | importin alpha-1 subunit, putative (IMPA4) | 59.4 | 6 | 74/61 | 37/31 | 1 |
| AT3G06720 | importin alpha-1 subunit, putative (IMPA1) | 58.6 | 8 | 160/61 | 62/28 | 2 |
| AT5G53480 | importin beta-2, putative | 96.2 | 16 | 295/61 | 50/32 | 2 |
| AT3G60830 | actin-related protein 7 (ARP7) | 39.9 | 12 | 285/61 | 53/28 | 3 |
| AT1G18450 | actin-related protein 4 (ARP4) | 48.9 | 12 | 230/61 | 44/28 | 2 |
| AT2G46020 | transcription regulatory protein SNF2 | 245.4 | 31 | 351/61 | 57/31 | 2 |
| | (ATPase) | | | | | |
| AT2G28290 | chromatin remodeling protein, SYD ATPase | 389.8 | 22 | 118/61 | 53/31 | 4 |
| AT1G21700 | SWIRM domain-containing protein/DNA- | 88.2 | 5 | | 32/32 | 2 |
| | binding family protein | | | | | |
| AT5G14170 | SWIB complex BAF60b domain-containing | 59.2 | 18 | 302/61 | 43/31 | 2 |
| | protein | | | | | |
| AT4G17330 | G2484-1, agenet (tudor-like) domain- | 113.3 | 25 | 317/61 | 61/32 | 3 |
| | containing protein | | | | | |
| AT4G27550 | trehalose phosphatase/synthase 4 | 89.4 | 15 | 68/61 | | 2 |
| AT1G65980 | thioredoxin-dependent peroxidase | 17.4 | 8 | 80/61 | | 2 |
| AT5G55210 | expressed protein | 18.5 | 4 | 105/61 | 49/31 | 2 |
| AT3G15000 | expressed protein similar to DAG protein | 42.8 | 3 | | 38/30 | 2 |
| AT4G35550 | homeobox-leucine zipper protein (HB-2)/ | 29.6 | 3 | | 33/28 | 1 |
| | HD-ZIP protein | | | | | |
| AT1G20670 | DNA-binding bromodomain-containing | 72.9 | 16 | 75/61 | | 1 |
| | protein | | | | | |
| AT1G08730 | myosin heavy chain (PCR43) (Fragment) | 174.6 | 18 | 70/61 | | 1 |
| AT5G13030 | expressed protein | 71.1 | 3 | | 31/29 | 1 |
| AT2G18876 | expressed protein | 43.5 | 11 | 67/61 | | 1 |
| AT5G17510 | expressed protein | 42.5 | 3 | | 37/28 | 1 |
| AT1G05370 | expressed protein | 49.9 | 12 | 66/61 | | 1 |
| AT4G21540 | putative sphingosine kinase (SphK) | 141.7 | 9 | 69/61 | | 1 |
| AT1G23900 | gamma-adaptin | 96.4 | 19 | 78/61 | | 1 |
| AT5G23690 | polynucleotide adenylyltransferase family | 59.6 | 11 | 66/61 | | 1 |
| | protein | | | | | |

The last column tells in how many of the four independent experiments an interactor was identified.

TABLE B

| | | | GO Molecular |
|---|---|---|---|
| AGI Code | Name/Description | GO Biological Process | Function |
| At4g16143 | Importin alpha-2 | Protein import into nucleus | Protein transporter |
| | (IMP2) | | activity |
| At1g09270 | Importin alpha-1 | Intracellular protein | Protein transporter |
| | (IMPA4) | transport | activity |
| At3g06720 | Importin alpha-1 | Intracellular protein | Protein transporter |
| | (IMPA1) | transport | activity |
| At5g53480 | Importin beta-2 | Protein import into nucleus | Protein transporter |
| | | | activity |
| At4g17330 | G2484-1 protein | unknown | RNA binding |
| At4g27550 | Trehalose | Trehalose biosynthesis | Trehalose phosphate |
| | phosphatase/synthase | | synthase activity |
| | 4 (TPS4) | | |
| At1g65980 | Thioredoxin- | unknown | Antioxidant activity |
| | dependent peroxidase | | |
| | 1 (TPX1) | | |
| At5g55210 | Expressed protein | unknown | unknown |
| At3g15000 | Expressed protein | unknown | unknown |
| | similar to DAG protein | | |
| At4g35550 | Wuschel-related | Regulation of transcription | DNA binding |
| | homeobox 13 | | |
| | (WOX13) | | |
| At1g20670 | Bromodomain- | unknown | DNA binding |
| | containing protein | | |
| At1g08730 | Myosin-like protein | Actin filament-based | Protein binding |
| | XIC | movement | |
| At5g13030 | Expressed protein | unknown | unknown |
| At2g18876 | Expressed protein | unknown | unknown |
| At5g17510 | Expressed protein | unknown | unknown |
| At1g05370 | Expressed protein | unknown | unknown |
| At4g21540 | Putative sphingosine | Activation of protein kinase | Kinase activity |
| | kinase | C activity | |
| At1g23900 | Gamma-adaptin | Vesicle-mediated transport | Clathrin binding |
| At5g23690 | Polynucleotide | RNA processing | RNA binding |
| | adenylyltransferase | | |
| | protein | | |

### Example 15

### Identification of Sequences Related to iSYT

[0324] Sequences (full length cDNA, ESTs or genomic) related to iSYT nucleic acid and polypeptides were identified amongst those maintained in the Entrez Nucleotides database at the National Center for Biotechnology Information (NCBI) and other sequence databases using database sequence search tools, such as the Basic Local Alignment Tool (BLAST) (Altschul et al. (1990) J. Mol. Biol. 215:403-410; and Altschul et al. (1997) Nucleic Acids Res. 25:3389-3402). The program is used to find regions of local similarity between sequences by comparing nucleic acid or polypeptide sequences to sequence databases and by calculating the statistical significance of matches. For example, the polypeptide encoded by the nucleic acid of SYT was used for the TBLASTN algorithm, with default settings and the filter to ignore low complexity sequences set off. The output of the analysis was viewed by pairwise comparison, and ranked according to the probability score (E-value), where the score reflect the probability that a particular alignment occurs by chance (the lower the E-value, the more significant the hit). In addition to E-values, comparisons were also scored by percentage identity. Percentage identity refers to the number of identical nucleotides (or amino acids) between the two compared nucleic acid (or polypeptide) sequences over a particular length. In some instances, the default parameters may be adjusted to modify the stringency of the search. For example the E-value may be increased to show less stringent matches. This way, short nearly exact matches may be identified.

[0325] Tables A2 to A26 provides a list of polypeptide sequences related to the polypeptides of Table A.

[0326] Sequences have been tentatively assembled and publicly disclosed by research institutions, such as The Institute for Genomic Research (TIGR; beginning with TA). The Eukaryotic Gene Orthologs (EGO) database may be used to identify such related sequences, either by keyword search or by using the BLAST algorithm with the nucleic acid sequence or polypeptide sequence of interest. Special nucleic acid sequence databases have been created for particular organisms, such as by the Joint Genome Institute. Furthermore, access to proprietary databases, has allowed the identification of novel nucleic acid and polypeptide sequences.

### Concerning SYT

TABLE A2
Preferred homologous polypeptides of SYT

| | | Database |
|---|---|---|
| Name | Source organism | accession number |
| Arath_SYT2 | Arabidopsis thaliana | AY102640.1 |
| Arath_SYT3 | Arabidopsis thaliana | AY102641.1 |
| Allce_SYT2 | Allium cepa | CF437485 |
| Aqufo_SYT1 | Aquilegia formosa × | DT758802.1 |
| | Aquilegia pubescens | |
| Aqufo_SYT2 | Aquilegia formosa × | TA15831_338618 |
| | Aquilegia pubescens | T25K16.15 |
| Aspof_SYT1 | Aspergillus officinalis | CV287542 |
| Betvu_SYT2 | Beta vulgaris | BQ594749.1 |
| | | BQ594658.1 |
| Bradi_SYT3 | Brachypodium distachyon | DV480064.1 |
| Brana_SYT1 | Brassica napus | CD823592 |
| Brana_SYT2 | Brassica napa | CN732814 |
| Chlre_SYT | Chlamydomonas reinhardtii | BQ814858, |
| | | jgi_Chlre3_194013_{—} |
| | | estExt_fgenesh2_{—} |
| | | pg.C_510025 |
| Citsi_SYT1 | Citrus sinensis | CB290588 |
| Citsi_SYT2 | Citrus sinensis | CV717501 |
| Cryja_SYT1 | Cryptomeria japonica | TA3001_3369_2 |
| Curlo_SYT2 | Curcuma longa | TA2676_136217 |
| Eupes_SYT2 | Euphorbia esula | DV144834 |
| Frave_SYT2 | Fragaria vesca | DY668312 |
| Glyma_SYT1.1 | Glycine max | TA55102_3847 |
| Glyma_SYT1.2 | Glycine max | TA51451_3847 |
| Glyma_SYT2.1 | Glycine max | BQ612648 |
| Glyma_SYT2.2 | Glycine max | TA48452_3847 |
| Glyso_SYT2 | Glycine soya | CA799921 |
| Gosar_SYT1 | Gossypium arboreum | BM359324 |
| Goshi_SYT1 | Gossypium hirsutum | DT558852 |
| Goshi_SYT2 | Gossypium hirsutum | DT563805 |
| Helan_SYT1 | Helianthus annuus | TA12738_4232 |
| Horvu_SYT2 | Hordeum vulgare | CA032350 |
| Lacse_SYT2 | Lactuca serriola | DW110765 |
| Lyces_SYT1 | Lycopersicon esculentum | AW934450.1 |
| | | BP893155.1 |
| Maldo_SYT2 | Malus domestica | CV084230 |
| | | DR997566 |
| Medtr_SYT1 | Medicago trunculata | CA858507.1 |
| Medtr_SYT2 | Medicago trunculata | CA858743 |
| | | BI310799.1 |
| | | AL382135.1 |
| Orysa_SYT1 | Oryza sativa | AK058575 |
| Orysa_SYT2 | Oryza sativa | AK105366 |
| Orysa_SYT3 | Oryza sativa | BP185008 |
| Panvi_SYT3 | Panicum virgatum | DN152517 |
| Phypa_SYT1.1 | Physcomitrella patens | TA28566_3218 |
| Phypa_SYT1.2 | Physcomitrella patens | TA21282_3218 |
| Phypa_SYT1.3 | Physcomitrella patens | TA20922_3218 |
| Phypa_SYT1.4 | Physcomitrella patens | TA29452_3218 |
| Picsi_SYT1 | Picea sitchensis | DR484100 |
| | | DR478464.1 |
| Pinta_SYT1 | Pinus taeda | DT625916 |
| Poptr_SYT1 | Populus trichocarpa | DT476906 |
| Poptr_SYT2 | Populus trichocarpa | scaff_XIV.493 |
| Poptr_SYT1.2 | Populus trichocarpa | CV257942.1 |
| Prupe_SYT2 | Prunus persica | DT454880.1 |
| | | DT455286.1 |
| Sacof_SYT1 | Saccharum officinarum | CA078249.1 |
| | | CA078630 |
| | | CA082679 |
| | | CA234526 |
| | | CA239244 |
| | | CA083312 |
| Sacof_SYT2 | Saccharum officinarum | CA110367 |
| Sacof_SYT3 | Saccharum officinarum | CA161933.1 |
| | | CA265085 |
| Soltu_SYT1.1 | Solanum tuberosum | CK265597 |
| Soltu_SYT1.2 | Solanum tuberosum | BG590990 |
| Soltu_SYT3 | Solanum tuberosum | CK272804 |
| Sorbi_SYT1 | Sorghum bicolor | TA40712_4558 |
| Sorbi_SYT2 | Sorghum bicolor | CF482417 |
| | | CW376917 |
| Sorbi_SYT3 | Sorghum bicolor | CX611128 |
| Taxof_SYT2 | Taraxacum officinale | TA1299_50225 |
| Taxof_SYT3 | Taraxacum officinale | TA5000_50225 |
| Triae_SYT1 | Triticum aestivum | TA105893_4565 |
| Triae_SYT2 | Triticum aestivum | CD901951 |
| Triae_SYT3 | Triticum aestivum | BJ246754 |
| | | BJ252709 |
| Vitvi_SYT1.1 | Vitis vinifera | DV219834 |
| Vitvi_SYT1.2 | Vitis vinifera | EE108079 |
| Vitvi_SYT2.1 | Vitis vinifera | EC939550 |
| Vitvi_SYT2.2 | Vitis vinifera | EE094148.1 |
| | | EC964169.1 |
| Volca_SYT | Volvox carteri | JGI_CBHO11121. |
| | | fwdJGI_CB |
| | | HO11121.rev |
| Welmi_SYT | Welwitschia mirabilis | DT598761 |
| Zeama_SYT1 | Zea mays | BG874129.1 |
| | | CA409022.1 |
| Zeama_SYT2 | Zea mays | AY106697 |
| Zeama_SYT3 | Zea mays | CO468901 |
| Homsa_SYT | Homo sapiens | CR542103 |

### Concerning the AT1G05370 Polypeptide

TABLE A2
Preferred homologous polypeptides. of AT1G05370 polypeptide

| iSYT | Name homologue |
|---|---|
| AT1G05370.1 | G. max_Glyma20g28380.3#1 |
| AT1G05370.1 | M. truncatula_AC161569_9.5#1 |
| AT1G05370.1 | O. sativa_Os03g0219100#1 |
| AT1G05370.1 | P. patens_NP13131528#1 |
| AT1G05370.1 | P. trichocarpa_scaff_X.810#1 |
| AT1G05370.1 | Z. mays_ZM07MC22382_BFb0062G18@22320#1 |

### Concerning AT1G08730 Polypeptide

TABLE A3
Preferred homologous polypeptides. of AT1G08730 polypeptide

| iSYT | Name homologue |
|---|---|
| AT1G08730.1 | >G. max_Glyma13g16710.1#1 |
| AT1G08730.1 | >M. truncatula_CU041231_65.4#1 |
| AT1G08730.1 | >O. sativa_Os06g0488200#1 |
| AT1G08730.1 | >P. patens_TC53472#1 |
| AT1G08730.1 | >P. trichocarpa_scaff_201.14#1 |
| AT1G08730.1 | >T. aestivum_TC339658#1 |
| AT1G08730.1 | >Z. mays_TC526723#1 |

### Concerning AT1G09270 Polypeptide

TABLE A4
Preferred homologous polypeptides. of AT1G09270 polypeptide

| iSYT | Name homologue |
|---|---|
| AT1G09270.1 | >B. napus_TC77714#1 |
| AT1G09270.1 | >G. max_Glyma09g04430.1#1 |
| AT1G09270.1 | >G. hirsutum_ES800234#1 |
| AT1G09270.1 | >H. vulgare_TC178368#1 |
| AT1G09270.1 | >M. truncatula_AC191599_15.4#1 |
| AT1G09270.1 | >O. sativa_Os05g0155500#1 |
| AT1G09270.1 | >P. patens_TC29288#1 |
| AT1G09270.1 | >P. trichocarpa_scaff_XIII.64#1 |
| AT1G09270.1 | >S. lycopersicum_TC192018#1 |
| AT1G09270.1 | >T. aestivum_TC326489#1 |
| AT1G09270.1 | >Z. mays_ZM07MC09815_62040840@9797#1 |

### Concerning AT1G18450 Polypeptide

TABLE A5
Preferred homologous polypeptides. of AT1G18450 polypeptide

| iSYT | Name homologue |
|---|---|
| AT1G18450.1 | >B. napus_BN06MC30721_51397463@30594#1 |
| AT1G18450.1 | >G. max_TC298093#1 |
| AT1G18450.1 | >G. hirsutum_TC140956#1 |
| AT1G18450.1 | >H. vulgare_c62682376hv270303@11037#1 |
| AT1G18450.1 | >M. truncatula_CU179920_30.3#1 |
| AT1G18450.1 | >O. sativa_Os08g0137200#1 |
| AT1G18450.1 | >P. patens_TC46936#1 |
| AT1G18450.1 | >P. trichocarpa_scaff_XII.526#1 |
| AT1G18450.1 | >S. lycopersicum_TC191897#1 |
| AT1G18450.1 | >T. aestivum_TC318743#1 |
| AT1G18450.1 | >Z. mays_ZM07MC12195_62264430@12170#1 |

### Concerning AT1G20670 Polypeptide

TABLE A6
Preferred homologous polypeptides. of AT1G20670 polypeptide.

| iSYT | Name homologue |
|---|---|
| AT1G20670 | >G. max_Glyma04g01850.1#1 |
| AT1G20670 | >O. sativa_LOC_Os09g37760.1#1 |
| AT1G20670 | >P. patens_TC29124#1 |
| AT1G20670 | >P. trichocarpa_scaff_II.76#1 |

### Concerning AT1G20670 Polypeptide

TABLE A7
Preferred homologous polypeptides. of AT1G20670 polypeptide.

| iSYT | Name homologue |
|---|---|
| AT1G21700 | >O. sativa_LOC_Os11g08080.1#1 |
| AT1G21700 | >P. trichocarpa_scaff_V.882#1 |

### Concerning AT1G23900 Polypeptide

TABLE A8
Preferred homologous polypeptides. of AT1G23900 polypeptide.

| iSYT | Name homologue |
|---|---|
| AT1G23900 | >B. napus_TC72705#1 |
| AT1G23900 | >G. max_Glyma01g03890.1#1 |
| AT1G23900 | >M. truncatula_CT025838_33.5#1 |
| AT1G23900 | >O. sativa_LOC_Os06g07090.2#1 |
| AT1G23900 | >P. patens_TC30541#1 |
| AT1G23900 | >P. trichocarpa_831911#1 |

### Concerning AT1G65980 Polypeptide

TABLE A10
Preferred homologous polypeptides. of AT1G65980 polypeptide.

| iSYT | Name homologue |
|---|---|
| AT1G65980 | >B. napus_TC67111#1 |
| AT1G65980 | >G. hirsutum_BE055703#1 |
| AT1G65980 | >G. max_TC283792#1 |
| AT1G65980 | >H. vulgare_TC156915#1 |
| AT1G65980 | >M. truncatula_TC127082#1 |
| AT1G65980 | >O. sativa_TC321488#1 |
| AT1G65980 | >P. patens_TC40270#1 |
| AT1G65980 | >P. trichocarpa_scaff_XIII.916#1 |
| AT1G65980 | >S. lycopersicum_TC196845#1 |
| AT1G65980 | >T. aestivum_TC288115#1 |
| AT1G65980 | >Z. mays_TC535995#1 |

### Concerning AT2G18876 Polypeptide

TABLE A11
Preferred homologous polypeptides. of AT2G18876 polypeptide.

| iSYT | Name homologue |
|---|---|
| AT2G18876 | >B. napus_TC73647#1 |
| AT2G18876 | >G. max_Glyma17g07040.1#1 |
| AT2G18876 | >M. truncatula_TC118724#1 |
| AT2G18876 | >O. sativa_Os08g0242900#1 |
| AT2G18876 | >P. patens_186245#1 |
| AT2G18876 | >P. trichocarpa_825889#1 |
| AT2G18876 | >Z. mays_TC516387#1 |

### Concerning AT2G28290 Polypeptide

TABLE A12
Preferred homologous polypeptides. of AT2G28290 polypeptide.

| iSYT | Name homologue |
|---|---|
| AT2G28290 | >B. napus_TC67556#1 |
| AT2G28290 | >G. hirsutum_TC164446#1 |
| AT2G28290 | >G. max_Glyma17g02540.2#1 |
| AT2G28290 | >M. truncatula_NP7265773#1 |
| AT2G28290 | >O. sativa_LOC_Os06g14406.1#1 |
| AT2G28290 | >P. trichocarpa_565765#1 |
| AT2G28290 | >Z. mays_TC537619#1 |

### Concerning AT2G46020 Polypeptide

TABLE A13
Preferred homologous polypeptides. of AT2G46020 polypeptide.

| iSYT | Name homologue |
|---|---|
| AT2G46020 | >G. max_Glyma18g46930.1#1 |
| AT2G46020 | >M. truncatula_TC112587#1 |
| AT2G46020 | >P. trichocarpa_scaff_XIV.322#1 |

### Concerning AT3G06720 Polypeptide

TABLE A14
Preferred homologous polypeptides..

| iSYT | Name homologue |
|---|---|
| AT3G06720 | >B. napus_TC67085#1 |
| AT3G06720 | >G. hirsutum_ES815460#1 |
| AT3G06720 | >G. max_Glyma17g03430.1#1 |
| AT3G06720 | >H. vulgare_TC178368#1 |
| AT3G06720 | >M. truncatula_AC191599_15.4#1 |
| AT3G06720 | >O. sativa_LOC_Os01g14950.1#1 |
| AT3G06720 | >P. patens_218909#1 |
| AT3G06720 | >P. trichocarpa_833349#1 |
| AT3G06720 | >S. lycopersicum_TC192018#1 |
| AT3G06720 | >T. aestivum_TC285294#1 |
| AT3G06720 | >Z. mays_TC468320#1 |

### Concerning AT3G15000 Polypeptide

TABLE A15
Preferred homologous polypeptides..

| iSYT | Name homologue |
|---|---|
| AT3G15000 | >B. napus_TC99775#1 |
| AT3G15000 | >G. hirsutum_TC130654#1 |
| AT3G15000 | >G. max_Glyma13g34670.1#1 |
| AT3G15000 | >H. vulgare_TC171299#1 |
| AT3G15000 | >M. truncatula_TC121620#1 |
| AT3G15000 | >O. sativa_LOC_Os09g33480.1#1 |
| AT3G15000 | >P. trichocarpa_scaff_146.21#1 |
| AT3G15000 | >S. lycopersicum_TC212195#1 |
| AT3G15000 | >T. aestivum_TC287172#1 |
| AT3G15000 | >Z. mays_TC476358#1 |

### Concerning AT3G60830 Polypeptide

TABLE A16
Preferred homologous polypeptides..

| iSYT | Name homologue |
|---|---|
| AT3G60830 | >B. napus_TC83795#1 |
| AT3G60830 | >G. hirsutum_ES802301#1 |
| AT3G60830 | >G. max_Glyma12g01010.1#1 |
| AT3G60830 | >M. truncatula_TC123694#1 |
| AT3G60830 | >O. sativa_TC300228#1 |
| AT3G60830 | >P. patens_TC39330#1 |
| AT3G60830 | >P. trichocarpa_TC89949#1 |
| AT3G60830 | >S. lycopersicum_TC194794#1 |
| AT3G60830 | >T. aestivum_TC308484#1 |
| AT3G60830 | >Z. mays_TC515322#1 |

### Concerning AT3G60830 Polypeptide

TABLE A17
Preferred homologous polypeptides.

| iSYT | Name homologue |
|---|---|
| AT4G16143 | >B. napus_TC67085#1 |
| AT4G16143 | >G. max_Glyma15g15480.1#1 |
| AT4G16143 | >G. hirsutum_ES815460#1 |
| AT4G16143 | >H. vulgare_TC178368#1 |
| AT4G16143 | >M. truncatula_AC191599_15.4#1 |
| AT4G16143 | >O. sativa_Os01g0253300#1 |
| AT4G16143 | >P. patens_TC52982#1 |
| AT4G16143 | >P. trichocarpa_833349#1 |
| AT4G16143 | >S. lycopersicum_TC192018#1 |
| AT4G16143 | >T. aestivum_TC285294#1 |
| AT4G16143 | >Z. mays_c62040840gm030403@6670#1 |

### Concerning AT4G17330 Polypeptide

TABLE A18
Preferred homologous polypeptides.

| iSYT | Name homologue |
|---|---|
| AT4G17330 | >B. napus_EE448802#1 |
| AT4G17330 | >G. max_TC316889#1 |
| AT4G17330 | >M. truncatula_TC114019#1 |
| AT4G17330 | >O. sativa_LOC_Os10g41030.3#1 |
| AT4G17330 | >P. trichocarpa_scaff_29.51#1 |

### Concerning AT4G21540 Polypeptide

TABLE A19
Preferred homologous polypeptides.

| iSYT | Name homologue |
|---|---|
| AT4G21540 | >G. max_Glyma07g30980.1#1 |
| AT4G21540 | >M. truncatula_AC175090_33.4#1 |
| AT4G21540 | >O. sativa_LOC_Os02g54490.1#1 |
| AT4G21540 | >P. patens_TC39605#1 |
| AT4G21540 | >P. trichocarpa_scaff_IV.215#1 |
| AT4G21540 | >Z. mays_TC484353#1 |

### Concerning AT4G27550. Polypeptide

TABLE A20
Preferred homologous polypeptides.

| iSYT | Name homologue |
|---|---|
| AT4G27550 | >B. napus_BN06MC19686_46389379@19622#1 |
| AT4G27550 | >G. max_Glyma12g36280.1#1 |
| AT4G27550 | >G. hirsutum_TC168377#1 |
| AT4G27550 | >M. truncatula_AC153460_26.4#1 |
| AT4G27550 | >O. sativa_LOC_Os05g44210.1#1 |
| AT4G27550 | >P. patens_TC45371#1 |
| AT4G27550 | >P. trichocarpa_scaff_168.14#1 |
| AT4G27550 | >S. lycopersicum_TC197800#1 |
| AT4G27550 | >T. aestivum_TC314116#1 |
| AT4G27550 | >Z. mays_ZM07MC29609_BFb0010E24@29519#1 |

### Concerning AT4G35550 Polypeptide

TABLE A21
Preferred homologous polypeptides.

| iSYT | Name homologue |
|---|---|
| AT4G35550 | >B. napus_BN06MC07552_42595637@7533#1 |
| AT4G35550 | >G. max_Glyma18g52490.1#1 |
| AT4G35550 | >G. hirsutum_TC148918#1 |
| AT4G35550 | >M. truncatula_TC115228#1 |
| AT4G35550 | >O. sativa_TC326307#1 |
| AT4G35550 | >P. patens_TC45997#1 |
| AT4G35550 | >P. trichocarpa_scaff_V.401#1 |
| AT4G35550 | >T. aestivum_CJ574771#1 |
| AT4G35550 | >Z. mays_TA9709_4577999#1 |

### Concerning AT5G13030 Polypeptide

TABLE A21
Preferred homologous polypeptides.

| iSYT | Name homologue |
|---|---|
| AT5G13030 | >B. napus_TC91422#1 |
| AT5G13030 | >G. max_Glyma20g39090.1#1 |
| AT5G13030 | >G. hirsutum_TC174829#1 |
| AT5G13030 | >M. truncatula_AC149471_14.5#1 |
| AT5G13030 | >O. sativa_TC288127#1 |
| AT5G13030 | >P. patens_TC30567#1 |
| AT5G13030 | >P. trichocarpa_scaff_I.133#1 |
| AT5G13030 | >T. aestivum_c54479201@7744#1 |
| AT5G13030 | >Z. mays_ZM07MC31636_BFb0358L02@31542#1 |

### Concerning AT5G14170 Polypeptide

TABLE A22
Preferred homologous polypeptides.

| iSYT | Name homologue |
|---|---|
| AT5G14170 | >AT5G14170.1 \| Symbols: CHC1 \| CHC1 \| chr5: |
| | 4568696-4570444 REVERSE |
| AT5G14170 | >A. thaliana_AT3G01890.1#1 |
| AT5G14170 | >AC189564.2 Brassica rapa subsp. pekinensis clone |
| | KBrH009B23 |
| AT5G14170 | >XM_002273713 Vitis vinifera hypothetical protein |
| | LOC100261825 |
| AT5G14170 | >O. sativa_LOC_Os04g31320.1#1 |
| AT5G14170 | >Oryza sativa AL662977 |
| AT5G14170 | >P. patens_113811#1 |
| AT5G14170 | >P. trichocarpa_scaff_XII.899#1 |
| AT5G14170 | >P. trichocarpa_scaff_88.108#1 |
| AT5G14170 | >P. trichocarpa_scaff_I.2133#1 |
| AT5G14170 | >T. aestivum_c59835991@17741#1 |
| AT5G14170 | >Triticum aestivum AK335297 |
| AT5G14170 | >Z. mays_ZM07MC18894_BFb0157J03@18844#1_{—} |
| | FL467690.1\| |

### Concerning AT5G17510 Polypeptide

TABLE A23
Preferred homologous polypeptides.

| iSYT | Name homologue |
|---|---|
| AT5G17510 | >A. thaliana putative glutamine-rich protein (At5g17510) mRNA, complete cds |
| | gi_17979156_gb_AY070079.1 _{—} |
| AT5G17510 | >Vitis vinifera hypothetical protein LOC100249418 (LOC100249418), |
| | mRNAgi_225454640_ref_XM_002267054.1_{—} |
| AT5G17510 | >Ricinus communis conserved hypothetical protein, |
| | mRNAgi_255566123_ref_XM_002524004.1_{—} |
| AT5G17510 | >Solanum lycopersicum cDNA, clone: LEFL1007BC07, HTC in |
| | leafgi_225312930_dbj_AK320272.1_{—} |
| AT5G17510 | >Sorghum bicolor hypothetical protein, |
| | mRNAgi_242085467_ref_XM_002443114.1_{—} |
| AT5G17510 | >Triticum aestivum cDNA, clone: WT002_P07, cultivar: Chinese Spring |
| | gi_241984762_dbj_AK332022.1_{—} |
| AT5G17510 | >Zea mays hypothetical protein LOC100276166 (LOC100276166), |
| | mRNAgi_226508721_ref_NM_001150017.1_{—} |

### Concerning AT5G23690Polypeptide

TABLE A24
Preferred homologous polypeptides.

| iSYT | Name homologue |
|---|---|
| AT5G23690 | >A. thaliana_AT5G23690.1#1 |
| AT5G23690 | >A. thaliana_AT1G28090.1#1 |
| AT5G23690 | >A. thaliana_AT3G48830.1#1 |
| AT5G23690 | >M. truncatula_AC151817_35.4#1 |
| AT5G23690 | >O. sativa_TC289531#1 |
| AT5G23690 | >O. sativa_TC310376#1 |
| AT5G23690 | >P. patens_161847#1 |
| AT5G23690 | >P. trichocarpa_scaff_XII.984#1 |
| AT5G23690 | >P. trichocarpa_scaff_XV.833#1 |
| AT5G23690 | >V. vinifera XM_002266778.1 hypothetical |
| | protein LOC100259104 (LOC100259104) |
| AT5G23690 | >Z. mays_TC467699#1 |
| AT5G23690 | >Z. mays_TC473496#1 |

### Concerning AT5G53480 Polypeptide

TABLE A25
Preferred homologous polypeptides.

| iSYT | Name homologue |
|---|---|
| AT5G53480 | >AT5G53480.1 Symbols: importin beta-2, putative chr5: |
| | 21731242-21733935 FORWARD |
| AT5G53480 | >A. thaliana_AT3G08943.1#1 |
| AT5G53480 | >A. thaliana_AT3G08947.1#1 |
| AT5G53480 | >G. max_Glyma04g41230.1#1 |
| AT5G53480 | >G. max_Glyma05g36630.1#1 |
| AT5G53480 | >G. max_Glyma06g13620.1#1 |
| AT5G53480 | >G. max_Glyma08g02930.1#1 |
| AT5G53480 | >H. vulgare_c62767390hv270303@6375#1 |
| AT5G53480 | >H. vulgare AK249047 |
| AT5G53480 | >O. sativa_LOC_Os12g38110.1#1 |
| AT5G53480 | >P. patens_TC30184#1 |
| AT5G53480 | >P. patens_TC31822#1 |
| AT5G53480 | >P. trichocarpa_scaff_VI.900#1 |
| AT5G53480 | >P. trichocarpa_scaff_XII.230#1 |
| AT5G53480 | >P. trichocarpa_scaff_XV.118#1 |
| AT5G53480 | >P. trichocarpa_scaff_XVI.1174#1 |
| AT5G53480 | >S. bicolor_XM_002442302.1 |

### Concerning AT5G55210 Polypeptide

TABLE A26
Preferred homologous polypeptides.

| iSYT | Name homologue |
|---|---|
| AT5G55210 | >A. thaliana_AT5G55210.1#1 |
| AT5G55210 | >A. thaliana_AT4G22320.1#1 |
| AT5G55210 | >B. napus_EV025360#1 |
| AT5G55210 | >B. napus_TC65291#1 |
| AT5G55210 | >B. napus_TC67583#1 |
| AT5G55210 | >B. napus_TC68897#1 |
| AT5G55210 | >B. napus_TC93468#1 |
| AT5G55210 | >G. max_Glyma08g43440.1#1 |
| AT5G55210 | >G. max_Glyma09g01220.1#1 |
| AT5G55210 | >G. max_Glyma15g12050.1#1 |
| AT5G55210 | >G. max_Glyma18g10110.1#1 |
| AT5G55210 | >H. vulgare_BG342941#1 |
| AT5G55210 | >H. vulgare_TC167448#1 |
| AT5G55210 | >M. truncatula_TC122534#1 |
| AT5G55210 | >M. truncatula_TC127795#1 |
| AT5G55210 | >O. sativa_LOC_Os08g25080.1#1 |
| AT5G55210 | >O. sativa_LOC_Os08g25080.2#1 |
| AT5G55210 | >O. sativa_LOC_Os09g11240.1#1 |
| AT5G55210 | >P. patens_167013#1 |
| AT5G55210 | >P. trichocarpa_scaff_166.68#1 |
| AT5G55210 | >P. trichocarpa_scaff_I.2546#1 |
| AT5G55210 | >P. trichocarpa_scaff_XI.195#1 |
| AT5G55210 | >T. aestivum_CK204604#1 |
| AT5G55210 | >T. aestivum_TC293410#1 |
| AT5G55210 | >Z. mays_FL309643#1 |
| AT5G55210 | >Z. mays_TC479416#1 |

### Example 16

### Alignment of an iSYT Polypeptide and Homologues Thereof

[0353] Alignment of polypeptide sequences is performed using the ClustalW 2.0 algorithm of progressive alignment (Thompson et al. (1997) Nucleic Acids Res 25:4876-4882; Chenna et al. (2003). Nucleic Acids Res 31:3497-3500) with standard setting (slow alignment, similarity matrix: or Blosum 62 (if polypeptides are aligned), gap opening penalty 10, gap extension penalty: 0.2). Minor manual editing is done to further optimise the alignment. A phylogenetic tree of an iSYT polypeptide and homologues thereof is constructed using a neighbour-joining clustering algorithm as provided in the AlignX programme from the Vector NTI (Invitrogen).

### Example 17

### Calculation of Global Percentage Identity Between Polypeptide Sequences

[0354] Global percentages of similarity and identity between full length polypeptide sequences useful in performing the methods of the invention were determined using one of the methods available in the art, the MatGAT (Matrix Global Alignment Tool) software (BMC Bioinformatics. 2003 4:29. MatGAT: an application that generates similarity/identity matrices using protein or DNA sequences. Campanella J J, Bitincka L, Smalley J; software hosted by Ledion Bitincka). MatGAT software generates similarity/identity matrices for DNA or protein sequences without needing pre-alignment of the data. The program performs a series of pair-wise alignments using the Myers and Miller global alignment algorithm (with a gap opening penalty of 12, and a gap extension penalty of 2), calculates similarity and identity using for example Blosum 62 (for polypeptides), and then places the results in a distance matrix. Sequence similarity is shown in the bottom half of the dividing line and sequence identity is shown in the top half of the diagonal dividing line.

[0355] Parameters used in the comparison are: Scoring matrix: Blosum62, First Gap: 12, Extending Gap: 2.

### Example 18

### Identification of Domains Comprised in Polypeptide Sequences Useful in Performing the Methods of the Invention

[0356] The Integrated Resource of Protein Families, Domains and Sites (InterPro) database is an integrated interface for the commonly used signature databases for text- and sequence-based searches. The InterPro database combines these databases, which use different methodologies and varying degrees of biological information about well-characterized proteins to derive protein signatures. Collaborating databases include SWISS-PROT, PROSITE, TrEMBL, PRINTS, Propom and Pfam, Smart and TIGRFAMs. Pfam is a large collection of multiple sequence alignments and hidden Markov models covering many common protein domains and families. Pfam is hosted at the Sanger Institute server in the United Kingdom. Interpro is hosted at the European Bioinformatics Institute in the United Kingdom.

[0357] The results of the InterPro scan of the polypeptide sequence representing the iSYT polypeptides of Table A are presented in Tables C1 to C20.

[0358] The term iSYT (interactor of SYT) and “AN3 interactor” as used herein are interexchangable.

TABLE C1
InterPro scan results (major accession numbers) of the AT1G05370 polypeptide.

| AN3 | | | | InterPro | amino acid | amino acid |
|---|---|---|---|---|---|---|
| interactor | Database | Domain accession | Domain name | accession | start coordinate | end coordinate |
| AT1G05370.1 | TMHMM | tmhmm | transmembrane_regions | NULL | 170 | 191 |
| AT1G05370.1 | TMHMM | tmhmm | transmembrane_regions | NULL | 144 | 166 |
| AT1G05370.1 | Seg | seg | seg | NULL | 318 | 330 |
| AT1G05370.1 | Seg | seg | seg | NULL | 235 | 256 |
| AT1G05370.1 | Seg | seg | seg | NULL | 150 | 163 |
| AT1G05370.1 | HMMPanther | PTHR10174 | RETINALDEHYDE BINDING | NULL | 18 | 150 |
| | | | PROTEIN-RELATED | | | |
| AT1G05370.1 | superfamily | SSF46938 | CRAL/TRIO N-terminal domain | IPR011074 | 14 | 83 |
| AT1G05370.1 | superfamily | SSF52087 | CRAL/TRIO domain | IPR001251 | 82 | 149 |
| AT1G05370.1 | ProfileScan | PS50191 | CRAL_TRIO | IPR001251 | 80 | 262 |
| AT1G05370.1 | HMMSmart | SM00516 | no description | IPR001251 | 86 | 229 |
| AT1G05370.1 | Gene3D | G3DSA:3.40.525.10 no | description | IPR001251 | 70 | 149 |
| AT1G08730.1 | superfamily | SSF54849 | GroEL-intermediate domain like | NULL | 940 | 1017 |

TABLE C2
InterPro scan results (major accession numbers) of the AT1G08730 polypeptide.

| AN3 | | | | InterPro | amino acid | amino acid |
|---|---|---|---|---|---|---|
| interactor | Database | Domain accession | Domain name | accession | start coordinate | end coordinate |
| AT1G08730.1 | superfamily | SSF54849 | GroEL-intermediate domain like | NULL | 940 | 1017 |
| AT1G08730.1 | superfamily | SSF52540 | P-loop containing nucleoside | NULL | 798 | 893 |
| | | | triphosphate hydrolases | | | |
| AT1G08730.1 | superfamily | SSF52540 | P-loop containing nucleoside | NULL | 38 | 797 |
| | | | triphosphate hydrolases | | | |
| AT1G08730.1 | SignalPHMM | signalp | signal-peptide | NULL | 1 | 23 |
| AT1G08730.1 | Seg | seg | seg | NULL | 1191 | 1208 |
| AT1G08730.1 | Seg | seg | seg | NULL | 1015 | 1037 |
| AT1G08730.1 | Seg | seg | seg | NULL | 950 | 966 |
| AT1G08730.1 | Seg | seg | seg | NULL | 605 | 618 |
| AT1G08730.1 | HMMPanther | PTHR13140:SF36 | MYOSIN XI | NULL | 1130 | 1517 |
| AT1G08730.1 | HMMPanther | PTHR13140:SF36 | MYOSIN XI | NULL | 870 | 925 |
| AT1G08730.1 | HMMPanther | PTHR13140:SF36 | MYOSIN XI | NULL | 312 | 840 |
| AT1G08730.1 | HMMPanther | PTHR13140:SF36 | MYOSIN XI | NULL | 17 | 292 |
| AT1G08730.1 | HMMPanther | PTHR13140 | MYOSIN | NULL | 1130 | 1517 |
| AT1G08730.1 | HMMPanther | PTHR13140 | MYOSIN | NULL | 870 | 925 |
| AT1G08730.1 | HMMPanther | PTHR13140 | MYOSIN | NULL | 312 | 840 |
| AT1G08730.1 | HMMPanther | PTHR13140 | MYOSIN | NULL | 17 | 292 |
| AT1G08730.1 | Gene3D | G3DSA:4.10.270.20no | description | NULL | 726 | 771 |
| AT1G08730.1 | Gene3D | G3DSA:3.30.538.10no | description | NULL | 71 | 304 |
| AT1G08730.1 | Gene3D | G3DSA:3.30.1370.40no | description | NULL | 655 | 721 |
| AT1G08730.1 | Gene3D | G3DSA:1.10.465.10no | description | NULL | 446 | 628 |
| AT1G08730.1 | Gene3D | G3DSA:1.10.183.10no | description | NULL | 320 | 428 |
| AT1G08730.1 | superfamily | SSF50084 | Myosin S1 fragment, N-terminal domain | IPR008989 | 13 | 37 |
| AT1G08730.1 | HMMPfam | PF02736 | Myosin_N | IPR004009 | 18 | 59 |
| AT1G08730.1 | ProfileScan | PS51126 | DILUTE | IPR002710 | 1168 | 1481 |
| AT1G08730.1 | HMMPfam | PF01843 | DIL | IPR002710 | 1356 | 1463 |
| AT1G08730.1 | BlastProDom | PD003376 | Q6ZGC5_EEEEE_Q6ZGC5; | IPR002710 | 1287 | 1434 |
| AT1G08730.1 | HMMSmart | SM00242 | no description | IPR001609 | 64 | 741 |
| AT1G08730.1 | HMMPfam | PF00063 | Myosin_head | IPR001609 | 72 | 728 |
| AT1G08730.1 | FPrintScan | PR00193 | MYOSINHEAVY | IPR001609 | 490 | 518 |
| AT1G08730.1 | FPrintScan | PR00193 | MYOSINHEAVY | IPR001609 | 437 | 465 |
| AT1G08730.1 | FPrintScan | PR00193 | MYOSINHEAVY | IPR001609 | 204 | 231 |
| AT1G08730.1 | FPrintScan | PR00193 | MYOSINHEAVY | IPR001609 | 157 | 182 |
| AT1G08730.1 | FPrintScan | PR00193 | MYOSINHEAVY | IPR001609 | 100 | 119 |
| AT1G08730.1 | BlastProDom | PD000355 | Q9ZVN3_ARATH_Q9ZVN3; | IPR001609 | 196 | 226 |
| AT1G08730.1 | ProfileScan | PS50096 | IQ | IPR000048 | 862 | 891 |
| AT1G08730.1 | ProfileScan | PS50096 | IQ | IPR000048 | 839 | 866 |
| AT1G08730.1 | ProfileScan | PS50096 | IQ | IPR000048 | 814 | 843 |
| AT1G08730.1 | ProfileScan | PS50096 | IQ | IPR000048 | 791 | 818 |
| AT1G08730.1 | ProfileScan | PS50096 | IQ | IPR000048 | 766 | 795 |
| AT1G08730.1 | ProfileScan | PS50096 | IQ | IPR000048 | 743 | 772 |
| AT1G08730.1 | HMMSmart | SM00015 | no description | IPR000048 | 861 | 883 |
| AT1G08730.1 | HMMSmart | SM00015 | no description | IPR000048 | 838 | 860 |
| AT1G08730.1 | HMMSmart | SM00015 | no description | IPR000048 | 813 | 835 |
| AT1G08730.1 | HMMSmart | SM00015 | no description | IPR000048 | 790 | 812 |
| AT1G08730.1 | HMMSmart | SM00015 | no description | IPR000048 | 765 | 787 |
| AT1G08730.1 | HMMSmart | SM00015 | no description | IPR000048 | 742 | 764 |
| AT1G08730.1 | HMMPfam | PF00612 | IQ | IPR000048 | 840 | 860 |
| AT1G08730.1 | HMMPfam | PF00612 | IQ | IPR000048 | 815 | 835 |
| AT1G08730.1 | HMMPfam | PF00612 | IQ | IPR000048 | 792 | 812 |
| AT1G08730.1 | HMMPfam | PF00612 | IQ | IPR000048 | 767 | 787 |
| AT1G08730.1 | HMMPfam | PF00612 | IQ | IPR000048 | 744 | 764 |

TABLE C3
InterPro scan results (major accession numbers) of the AT1G09270 polypeptide.

| AN3 | | | | InterPro | amino acid | amino acid |
|---|---|---|---|---|---|---|
| interactor | Database | Domain accession | Domain name | accession | start coordinate | end coordinate |
| AT1G09270.1 | HMMPanther | PTHR23316 | PTHR23316 | NULL | 1 | 537 |
| AT1G09270.1 | HMMPanther | PTHR23316 | PTHR23316 | NULL | 1 | 537 |
| AT1G09270.1 | superfamily | SSF48371 | ARM-type_fold | IPR016024 | 49 | 501 |
| AT1G09270.1 | Gene3D | G3DSA:1.25.10.10ARM-like | | IPR011989 | 81 | 501 |
| AT1G09270.1 | ProfileScan | PS51214 | IBB | IPR002652 | 1 | 58 |
| AT1G09270.1 | HMMPfam | PF01749 | IBB | IPR002652 | 4 | 102 |
| AT1G09270.1 | Gene3D | G3DSA:1.20.5.690Importin-a-like_IBB- | | IPR002652 | 9 | 52 |
| | | bd | | | | |
| AT1G09270.1 | ProfileScan | PS50176 | ARM_REPEAT | IPR000225 | 333 | 376 |
| AT1G09270.1 | ProfileScan | PS50176 | ARM_REPEAT | IPR000225 | 165 | 207 |
| AT1G09270.1 | ProfileScan | PS50176 | ARM_REPEAT | IPR000225 | 122 | 165 |
| AT1G09270.1 | HMMSmart | SM00185 | ARM | IPR000225 | 408 | 448 |
| AT1G09270.1 | HMMSmart | SM00185 | ARM | IPR000225 | 365 | 405 |
| AT1G09270.1 | HMMSmart | SM00185 | ARM | IPR000225 | 322 | 363 |
| AT1G09270.1 | HMMSmart | SM00185 | ARM | IPR000225 | 280 | 320 |
| AT1G09270.1 | HMMSmart | SM00185 | ARM | IPR000225 | 239 | 278 |
| AT1G09270.1 | HMMSmart | SM00185 | ARM | IPR000225 | 195 | 237 |
| AT1G09270.1 | HMMSmart | SM00185 | ARM | IPR000225 | 154 | 194 |
| AT1G09270.1 | HMMSmart | SM00185 | ARM | IPR000225 | 111 | 152 |
| AT1G09270.1 | HMMPfam | PF00514 | Arm | IPR000225 | 408 | 448 |
| AT1G09270.1 | HMMPfam | PF00514 | Arm | IPR000225 | 365 | 405 |
| AT1G09270.1 | HMMPfam | PF00514 | Arm | IPR000225 | 322 | 363 |
| AT1G09270.1 | HMMPfam | PF00514 | Arm | IPR000225 | 280 | 320 |
| AT1G09270.1 | HMMPfam | PF00514 | Arm | IPR000225 | 239 | 278 |
| AT1G09270.1 | HMMPfam | PF00514 | Arm | IPR000225 | 196 | 237 |
| AT1G09270.1 | HMMPfam | PF00514 | Arm | IPR000225 | 154 | 194 |
| AT1G09270.1 | HMMPfam | PF00514 | Arm | IPR000225 | 111 | 152 |

TABLE C4
InterPro scan results (major accession numbers) of the AT1G18450. polypeptide.

| AN3 | | | | InterPro | amino acid | amino acid |
|---|---|---|---|---|---|---|
| interactor | Database | Domain accession | Domain name | accession | start coordinate | end coordinate |
| AT1G18450.1 | superfamily | SSF53067 | SSF53067 | NULL | 170 | 441 |
| AT1G18450.1 | HMMPanther | PTHR11937:SF32 | PTHR11937:SF32 | NULL | 254 | 441 |
| AT1G18450.1 | superfamily | SSF53067 | SSF53067 | NULL | 3 | 170 |
| AT1G18450.1 | HMMPanther | PTHR11937:SF32 | PTHR11937:SF32 | NULL | 74 | 223 |
| AT1G18450.1 | HMMPanther | PTHR11937:SF32 | PTHR11937:SF32 | NULL | 31 | 441 |
| AT1G18450.1 | HMMPanther | PTHR11937:SF32 | PTHR11937:SF32 | NULL | 31 | 52 |
| AT1G18450.1 | Gene3D | G3DSA:3.30.420.40G3DSA:3.30.420.40 | | NULL | 404 | 441 |
| AT1G18450.1 | Gene3D | G3DSA:3.30.420.40G3DSA:3.30.420.40 | | NULL | 296 | 387 |
| AT1G18450.1 | Gene3D | G3DSA:3.30.420.40G3DSA:3.30.420.40 | | NULL | 3 | 164 |
| AT1G18450.1 | HMMSmart | SM00268 | ACTIN | IPR004000 | 7 | 441 |
| AT1G18450.1 | HMMPfam | PF00022 | Actin | IPR004000 | 4 | 441 |
| AT1G18450.1 | HMMPanther | PTHR11937 | Actin_like | IPR004000 | 31 | 441 |

TABLE C5
InterPro scan results (major accession numbers) of the AT1G20670 polypeptide.

| AN3 | | | | InterPro | amino acid | amino acid |
|---|---|---|---|---|---|---|
| interactor | Database | Domain accession | Domain name | accession | start coordinate | end coordinate |
| AT1G20670.1 | HMMPanther | PTHR22881:SF3 | PTHR22881:SF3 | NULL | 173 | 652 |
| AT1G20670.1 | HMMPanther | PTHR22881:SF3 | PTHR22881:SF3 | NULL | 173 | 652 |
| AT1G20670.1 | HMMPanther | PTHR22881 | PTHR22881 | NULL | 173 | 652 |
| AT1G20670.1 | HMMPanther | PTHR22881 | PTHR22881 | NULL | 173 | 652 |
| AT1G20670.1 | superfamily | SSF47370 | Bromodomain | IPR001487 | 145 | 288 |
| AT1G20670.1 | ProfileScan | PS50014 | BROMODOMAIN_2 | IPR001487 | 188 | 258 |
| AT1G20670.1 | ProfileScan | PS00633 | BROMODOMAIN_1 | IPR001487 | 194 | 250 |
| AT1G20670.1 | HMMSmart | SM00297 | BROMO | IPR001487 | 169 | 277 |
| AT1G20670.1 | HMMPfam | PF00439 | Bromodomain | IPR001487 | 176 | 263 |
| AT1G20670.1 | Gene3D | G3DSA:1.20.920.10Bromodomain | | IPR001487 | 152 | 306 |
| AT1G20670.1 | FPrintScan | PR00503 | BROMODOMAIN | IPR001487 | 239 | 258 |
| AT1G20670.1 | FPrintScan | PR00503 | BROMODOMAIN | IPR001487 | 221 | 239 |
| AT1G20670.1 | FPrintScan | PR00503 | BROMODOMAIN | IPR001487 | 205 | 221 |

TABLE C6
InterPro scan results (major accession numbers) of the AT1G21700 polypeptide.

| AN3 | | | | InterPro | amino acid | amino acid |
|---|---|---|---|---|---|---|
| interactor | Database | Domain accession | Domain name | accession | start coordinate | end coordinate |
| AT1G21700.1 | HMMPanther | PTHR12802:SF4 | PTHR12802:SF4 | NULL | 175 | 807 |
| AT1G21700.1 | HMMPanther | PTHR12802:SF4 | PTHR12802:SF4 | NULL | 175 | 807 |
| AT1G21700.1 | HMMPanther | PTHR12802 | PTHR12802 | NULL | 175 | 807 |
| AT1G21700.1 | HMMPanther | PTHR12802 | PTHR12802 | NULL | 175 | 807 |
| AT1G21700.1 | HMMPfam | PF00249 | Myb_DNA-binding | IPR014778 | 400 | 445 |
| AT1G21700.1 | superfamily | SSF46689 | Homeodomain_like | IPR009057 | 394 | 447 |
| AT1G21700.1 | ProfileScan | PS50934 | SWIRM | IPR007526 | 176 | 274 |
| AT1G21700.1 | HMMPfam | PF04433 | SWIRM | IPR007526 | 176 | 265 |
| AT1G21700.1 | ProfileScan | PS50090 | MYB_3 | IPR001005 | 402 | 445 |
| AT1G21700.1 | HMMSmart | SM00717 | SANT | IPR001005 | 399 | 447 |

TABLE C7
InterPro scan results (major accession numbers) of the AT1G23900 polypeptide.

| AN3 | | | | InterPro | amino acid | amino acid |
|---|---|---|---|---|---|---|
| interactor | Database | Domain accession | Domain name | accession | start coordinate | end coordinate |
| AT1G23900.2 | HMMPanther | PTHR22780:SF5 | PTHR22780:SF5 | NULL | 10 | 876 |
| AT1G23900.2 | HMMPanther | PTHR22780:SF5 | PTHR22780:SF5 | NULL | 10 | 876 |
| AT1G23900.2 | HMMPanther | PTHR22780 | PTHR22780 | NULL | 10 | 876 |
| AT1G23900.2 | HMMPanther | PTHR22780 | PTHR22780 | NULL | 10 | 876 |
| AT1G23900.2 | HMMPIR | PIRSF037094 | AP1 _complex_gamma | IPR017107 | 1 | 876 |
| AT1G23900.2 | superfamily | SSF48371 | ARM-type_fold | IPR016024 | 6 | 591 |
| AT1G23900.2 | superfamily | SSF49348 | Clath_adapt | IPR013041 | 726 | 873 |
| AT1G23900.2 | Gene3D | G3DSA:1.25.10.10ARM-like | | IPR011989 | 9 | 572 |
| AT1G23900.2 | ProfileScan | PS50180 | GAE | IPR008153 | 756 | 873 |
| AT1G23900.2 | Gene3D | G3DSA:2.60.40.1230 | | IPR008153 | 757 | 873 |
| | | Clathrin | | | | |
| | | g-adaptin_app | | | | |
| AT1G23900.2 | BlastProDom | PD021457 | Gamma_adaptin_C | IPR008153 | 760 | 873 |
| AT1G23900.2 | HMMSmart | SM00809 | Alpha_adaptinC2 | IPR008152 | 753 | 873 |
| AT1G23900.2 | HMMPfam | PF02883 | Alpha_adaptinC2 | IPR008152 | 753 | 873 |
| AT1G23900.2 | HMMPfam | PF01602 | Adaptin_N | IPR002553 | 26 | 580 |

TABLE C8
InterPro scan results (major accession numbers) of the AT1G65980 polypeptide.

| AN3 | | | | InterPro | amino acid | amino acid |
|---|---|---|---|---|---|---|
| interactor | Database | Domain accession | Domain name | accession | start coordinate | end coordinate |
| AT1G65980.2 | HMMPanther | PTHR10430:SF4 | PTHR10430:SF4 | NULL | 1 | 104 |
| AT1G65980.2 | HMMPanther | PTHR10430:SF4 | PTHR10430:SF4 | NULL | 1 | 104 |
| AT1G65980.2 | HMMPanther | PTHR10430 | PTHR10430 | NULL | 1 | 104 |
| AT1G65980.2 | HMMPanther | PTHR10430 | PTHR10430 | NULL | 1 | 104 |
| AT1G65980.2 | HMMPfam | PF08534 | Redoxin | IPR013740 | 5 | 120 |
| AT1G65980.2 | superfamily | SSF52833 | Thiordxn-like_fd | IPR012336 | 4 | 103 |

| | | | | | |
|---|---|---|---|---|---|
| AT1G65980.2 | Gene3D | G3DSA:3.40.30.10Thioredoxin_fold | IPR012335 | 2 | 104 |

TABLE C9
InterPro scan results (major accession numbers) of the AT2G18876 polypeptide.

| AN3 | | | | InterPro | amino acid | amino acid |
|---|---|---|---|---|---|---|
| interactor | Database | Domain accession | Domain name | accession | start coordinate | end coordinate |
| AT2G18876.2 | HMMPanther | PTHR21736:SF12 | PTHR21736:SF12 | NULL | 64 | 284 |
| AT2G18876.2 | HMMPanther | PTHR21736:SF12 | PTHR21736:SF12 | NULL | 64 | 284 |
| AT2G18876.2 | HMMPanther | PTHR21736 | PTHR21736 | NULL | 64 | 284 |
| AT2G18876.2 | HMMPanther | PTHR21736 | PTHR21736 | NULL | 64 | 284 |

TABLE C10
InterPro scan results (major accession numbers) of the AT2G46020 polypeptide.

| AN3 | | | | InterPro | amino acid | amino acid |
|---|---|---|---|---|---|---|
| interactor | Database | Domain accession | Domain name | accession | start coordinate | end coordinate |
| AT2G46020.2 | superfamily | SSF52540 | SSF52540 | NULL | 1300 | 1434 |
| AT2G46020.2 | superfamily | SSF52540 | SSF52540 | NULL | 758 | 1157 |
| AT2G46020.2 | HMMPanther | PTHR10799:SF76 | PTHR10799:SF76 | NULL | 1465 | 1721 |
| AT2G46020.2 | HMMPanther | PTHR10799:SF76 | PTHR10799:SF76 | NULL | 965 | 1430 |
| AT2G46020.2 | HMMPanther | PTHR10799:SF76 | PTHR10799:SF76 | NULL | 202 | 217 |
| AT2G46020.2 | HMMPanther | PTHR10799:SF76 | PTHR10799:SF76 | NULL | 24 | 1721 |
| AT2G46020.2 | HMMPanther | PTHR10799:SF76 | PTHR10799:SF76 | NULL | 24 | 74 |
| AT2G46020.2 | HMMPanther | PTHR10799 | PTHR10799 | NULL | 1465 | 1721 |
| AT2G46020.2 | HMMPanther | PTHR10799 | PTHR10799 | NULL | 965 | 1430 |
| AT2G46020.2 | HMMPanther | PTHR10799 | PTHR10799 | NULL | 202 | 217 |
| AT2G46020.2 | HMMPanther | PTHR10799 | PTHR10799 | NULL | 24 | 1721 |
| AT2G46020.2 | HMMPanther | PTHR10799 | PTHR10799 | NULL | 24 | 74 |
| AT2G46020.2 | Gene3D | G3DSA:3.40.50.300G3DSA:3.40.50.300 | | NULL | 1309 | 1444 |
| AT2G46020.2 | HMMPfam | PF08880 | QLQ | IPR014978 | 462 | 499 |
| AT2G46020.2 | ProfileScan | PS51192 | HELICASE_ATP_{—} | IPR014021 | 993 | 1158 |
| | | | BIND_1 | | | |
| AT2G46020.2 | HMMSmart | SM00487 | DEXDc | IPR014001 | 977 | 1166 |
| AT2G46020.2 | ProfileScan | PS51194 | HELICASE_CTER | IPR001650 | 1312 | 1489 |
| AT2G46020.2 | HMMSmart | SM00490 | HELICc | IPR001650 | 1338 | 1422 |
| AT2G46020.2 | HMMPfam | PF00271 | Helicase_C | IPR001650 | 1343 | 1422 |
| AT2G46020.2 | superfamily | SSF47370 | Bromodomain | IPR001487 | 1890 | 2010 |
| AT2G46020.2 | HMMSmart | SM00297 | BROMO | IPR001487 | 1900 | 2007 |
| AT2G46020.2 | Gene3D | G3DSA:1.20.920.10Bromodomain | | IPR001487 | 1889 | 2003 |
| AT2G46020.2 | HMMPfam | PF00176 | SNF2_N | IPR000330 | 984 | 1291 |

TABLE C11
InterPro scan results (major accession numbers) of the AT3G06720 polypeptide.

| AN3 | | | | InterPro | amino acid | amino acid |
|---|---|---|---|---|---|---|
| interactor | Database | Domain accession | Domain name | accession | start coordinate | end coordinate |
| AT3G06720.1 | HMMPanther | PTHR23316 | PTHR23316 | NULL | 1 | 531 |
| AT3G06720.1 | HMMPanther | PTHR23316 | PTHR23316 | NULL | 1 | 531 |
| AT3G06720.1 | superfamily | SSF48371 | ARM-type_fold | IPR016024 | 43 | 494 |
| AT3G06720.1 | Gene3D | G3DSA:1.25.10.10ARM- | | IPR011989 | 72 | 494 |
| | | like | | | | |
| AT3G06720.1 | ProfileScan | PS51214 | IBB | IPR002652 | 1 | 58 |
| AT3G06720.1 | HMMPfam | PF01749 | IBB | IPR002652 | 4 | 95 |
| AT3G06720.1 | ProfileScan | PS50176 | ARM_REPEAT | IPR000225 | 326 | 361 |
| AT3G06720.1 | ProfileScan | PS50176 | ARM_REPEAT | IPR000225 | 242 | 284 |
| AT3G06720.1 | ProfileScan | PS50176 | ARM_REPEAT | IPR000225 | 158 | 186 |
| AT3G06720.1 | ProfileScan | PS50176 | ARM_REPEAT | IPR000225 | 115 | 154 |
| AT3G06720.1 | HMMSmart | SM00185 | ARM | IPR000225 | 401 | 441 |
| AT3G06720.1 | HMMSmart | SM00185 | ARM | IPR000225 | 358 | 398 |
| AT3G06720.1 | HMMSmart | SM00185 | ARM | IPR000225 | 315 | 356 |
| AT3G06720.1 | HMMSmart | SM00185 | ARM | IPR000225 | 273 | 313 |
| AT3G06720.1 | HMMSmart | SM00185 | ARM | IPR000225 | 232 | 271 |
| AT3G06720.1 | HMMSmart | SM00185 | ARM | IPR000225 | 188 | 230 |
| AT3G06720.1 | HMMSmart | SM00185 | ARM | IPR000225 | 147 | 187 |
| AT3G06720.1 | HMMSmart | SM00185 | ARM | IPR000225 | 104 | 145 |
| AT3G06720.1 | HMMPfam | PF00514 | Arm | IPR000225 | 401 | 441 |
| AT3G06720.1 | HMMPfam | PF00514 | Arm | IPR000225 | 358 | 398 |
| AT3G06720.1 | HMMPfam | PF00514 | Arm | IPR000225 | 315 | 356 |
| AT3G06720.1 | HMMPfam | PF00514 | Arm | IPR000225 | 273 | 313 |
| AT3G06720.1 | HMMPfam | PF00514 | Arm | IPR000225 | 232 | 271 |
| AT3G06720.1 | HMMPfam | PF00514 | Arm | IPR000225 | 189 | 230 |
| AT3G06720.1 | HMMPfam | PF00514 | Arm | IPR000225 | 147 | 187 |
| AT3G06720.1 | HMMPfam | PF00514 | Arm | IPR000225 | 104 | 145 |

TABLE C12
InterPro scan results (major accession numbers) of the AT3G15000 polypeptide.

| AN3 | | | | InterPro | amino acid | amino acid |
|---|---|---|---|---|---|---|
| interactor | Database | Domain accession | Domain name | accession | start coordinate | end coordinate |
| AT3G15000.1 | Seg | seg | seg | NULL | 311 | 385 |
| AT3G15000.1 | Seg | seg | seg | NULL | 280 | 302 |
| AT3G15000.1 | Seg | seg | seg | NULL | 239 | 278 |
| AT3G15000.1 | Seg | seg | seg | NULL | 206 | 229 |
| AT3G15000.1 | Seg | seg | seg | NULL | 25 | 50 |

TABLE C13
InterPro scan results (major accession numbers) of the AT3G60830 polypeptide.

| AN3 | | | | InterPro | amino acid | amino acid |
|---|---|---|---|---|---|---|
| interactor | Database | Domain accession | Domain name | accession | start coordinate | end coordinate |
| AT3G60830.1 | superfamily | SSF53067 | SSF53067 | NULL | 135 | 363 |
| AT3G60830.1 | superfamily | SSF53067 | SSF53067 | NULL | 1 | 141 |
| AT3G60830.1 | HMMPanther | PTHR11937:SF26 | PTHR11937:SF26 | NULL | 20 | 363 |
| AT3G60830.1 | HMMPanther | PTHR11937:SF26 | PTHR11937:SF26 | NULL | 20 | 363 |
| AT3G60830.1 | Gene3D | G3DSA:3.30.420.40G3DSA:3.30.420.40 | | NULL | 325 | 363 |
| AT3G60830.1 | Gene3D | G3DSA:3.30.420.40G3DSA:3.30.420.40 | | NULL | 228 | 300 |
| AT3G60830.1 | Gene3D | G3DSA:3.30.420.40G3DSA:3.30.420.40 | | NULL | 3 | 128 |
| AT3G60830.1 | HMMSmart | SM00268 | ACTIN | IPR004000 | 1 | 363 |
| AT3G60830.1 | HMMPfam | PF00022 | Actin | IPR004000 | 3 | 363 |
| AT3G60830.1 | HMMPanther | PTHR11937 | Actin_like | IPR004000 | 20 | 363 |
| AT3G60830.1 | FPrintScan | PR00190 | ACTIN | IPR004000 | 219 | 235 |
| AT3G60830.1 | FPrintScan | PR00190 | ACTIN | IPR004000 | 128 | 147 |
| AT3G60830.1 | FPrintScan | PR00190 | ACTIN | IPR004000 | 103 | 116 |
| AT3G60830.1 | FPrintScan | PR00190 | ACTIN | IPR004000 | 23 | 32 |

TABLE C14
InterPro scan results (major accession numbers) of the AT4G16143 polypeptide.

| AN3 | | | | InterPro | amino acid | amino acid |
|---|---|---|---|---|---|---|
| interactor | Database | Domain accession | Domain name | accession | start coordinate | end coordinate |
| AT4G16143.1 | Seg | seg | seg | NULL | 333 | 340 |
| AT4G16143.1 | HMMPanther | PTHR23316 | IMPORTIN | NULL | 1 | 534 |
| | | | ALPHA | | | |
| AT4G16143.1 | superfamily | SSF48371 | ARM repeat | IPR016024 | 77 | 499 |
| AT4G16143.1 | Gene3D | G3DSA:1.25.10.10no | description | IPR011989 | 77 | 499 |
| AT4G16143.1 | ProfileScan | PS51214 | IBB | IPR002652 | 1 | 58 |
| AT4G16143.1 | HMMPfam | PF01749 | IBB | IPR002652 | 4 | 100 |
| AT4G16143.1 | ProfileScan | PS50176 | ARM_REPEAT | IPR000225 | 331 | 374 |
| AT4G16143.1 | ProfileScan | PS50176 | ARM_REPEAT | IPR000225 | 289 | 331 |
| AT4G16143.1 | ProfileScan | PS50176 | ARM_REPEAT | IPR000225 | 247 | 289 |
| AT4G16143.1 | ProfileScan | PS50176 | ARM_REPEAT | IPR000225 | 163 | 205 |
| AT4G16143.1 | ProfileScan | PS50176 | ARM_REPEAT | IPR000225 | 120 | 163 |
| AT4G16143.1 | HMMSmart | SM00185 | no description | IPR000225 | 406 | 446 |
| AT4G16143.1 | HMMSmart | SM00185 | no description | IPR000225 | 363 | 403 |
| AT4G16143.1 | HMMSmart | SM00185 | no description | IPR000225 | 320 | 361 |
| AT4G16143.1 | HMMSmart | SM00185 | no description | IPR000225 | 278 | 318 |
| AT4G16143.1 | HMMSmart | SM00185 | no description | IPR000225 | 237 | 276 |
| AT4G16143.1 | HMMSmart | SM00185 | no description | IPR000225 | 193 | 235 |
| AT4G16143.1 | HMMSmart | SM00185 | no description | IPR000225 | 152 | 192 |
| AT4G16143.1 | HMMSmart | SM00185 | no description | IPR000225 | 109 | 150 |
| AT4G16143.1 | HMMPfam | PF00514 | Arm | IPR000225 | 406 | 446 |
| AT4G16143.1 | HMMPfam | PF00514 | Arm | IPR000225 | 363 | 403 |
| AT4G16143.1 | HMMPfam | PF00514 | Arm | IPR000225 | 320 | 361 |
| AT4G16143.1 | HMMPfam | PF00514 | Arm | IPR000225 | 278 | 318 |
| AT4G16143.1 | HMMPfam | PF00514 | Arm | IPR000225 | 237 | 276 |
| AT4G16143.1 | HMMPfam | PF00514 | Arm | IPR000225 | 194 | 235 |
| AT4G16143.1 | HMMPfam | PF00514 | Arm | IPR000225 | 152 | 192 |
| AT4G16143.1 | HMMPfam | PF00514 | Arm | IPR000225 | 109 | 150 |

TABLE C15
InterPro scan results (major accession numbers) of the AT4G21540 polypeptide.

| AN3 | | | | InterPro | amino acid | amino acid |
|---|---|---|---|---|---|---|
| interactor | Database | Domain accession | Domain name | accession | start coordinate | end coordinate |
| AT4G21540.1 | SignalPHMM | signalp | signal-peptide | NULL | 1 | 30 |
| AT4G21540.1 | Seg | seg | seg | NULL | 226 | 236 |
| AT4G21540.1 | Seg | seg | seg | NULL | 19 | 37 |
| AT4G21540.1 | HMMPanther | PTHR12358:SF10 | SPHINGOSINE KINASE- | NULL | 373 | 747 |
| | | | RELATED | | | |
| AT4G21540.1 | HMMPanther | PTHR12358 | SPHINGOSINE KINASE | NULL | 373 | 747 |
| AT4G21540.1 | HMMSmart | SM00046 | no description | IPR001206 | 909 | 1041 |
| AT4G21540.1 | HMMSmart | SM00046 | no description | IPR001206 | 379 | 515 |
| AT4G21540.1 | HMMPfam | PF00781 | DAGK_cat | IPR001206 | 909 | 1041 |
| AT4G21540.1 | HMMPfam | PF00781 | DAGK_cat | IPR001206 | 379 | 515 |
| AT4G21540.1 | BlastProDom | PD005043 | O65419_ARATH_O65419; | IPR001206 | 908 | 1018 |
| AT4G21540.1 | BlastProDom | PD005043 | O65419_ARATH_O65419; | IPR001206 | 378 | 488 |

TABLE C16
InterPro scan results (major accession numbers) of the AT4G27550 polypeptide.

| AN3 | | | | InterPro | amino acid | amino acid |
|---|---|---|---|---|---|---|
| interactor | Database | Domain accession | Domain name | accession | start coordinate | end coordinate |
| AT4G27550.1 | superfamily | SSF56784 | SSF56784 | NULL | 511 | 790 |
| AT4G27550.1 | superfamily | SSF53756 | SSF53756 | NULL | 4 | 467 |
| AT4G27550.1 | HMMPanther | PTHR10788 | PTHR10788 | NULL | 68 | 730 |
| AT4G27550.1 | HMMPanther | PTHR10788 | PTHR10788 | NULL | 68 | 730 |
| AT4G27550.1 | Gene3D | G3DSA:3.40.50.2000G3DSA:3.40.50.2000 | | NULL | 247 | 452 |
| AT4G27550.1 | HMMTigr | TIGR00685 | T6PP | IPR003337 | 508 | 791 |
| AT4G27550.1 | HMMPfam | PF02358 | Trehalose_PPase | IPR003337 | 514 | 758 |
| AT4G27550.1 | HMMPfam | PF00982 | Glyco_transf_20 | IPR001830 | 4 | 469 |

TABLE C17
InterPro scan results (major accession numbers) of the AT5G13030 polypeptide.

| AN3 | | | | InterPro | amino acid | amino acid |
|---|---|---|---|---|---|---|
| interactor | Database | Domain accession | Domain name | accession | start coordinate | end coordinate |
| AT5G13030.1 | HMMPfam | PF02696 | UPF0061 | IPR003846 | 108 | 604 |
| AT5G14170.1 | HMMPanther | PTHR13844 | PTHR13844 | NULL | 250 | 523 |
| AT5G14170.1 | HMMPanther | PTHR13844 | PTHR13844 | NULL | 250 | 523 |
| AT5G14170.1 | superfamily | SSF47592 | MDM2 | IPR003121 | 308 | 400 |
| AT5G14170.1 | HMMPfam | PF02201 | SWIB | IPR003121 | 315 | 390 |
| AT5G14170.1 | Gene3D | G3DSA:1.10.245.10SWIB_MDM2 | | IPR003121 | 308 | 400 |

TABLE C18
InterPro scan results (major accession numbers) of the AT5G17510 polypeptide.

| AN3 | | | | InterPro | amino acid | amino acid |
|---|---|---|---|---|---|---|
| interactor | Database | Domain accession | Domain name | accession | start coordinate | end coordinate |
| AT5G17510.1 | Seg | seg | seg | NULL | 343 | 357 |
| AT5G17510.1 | Seg | seg | seg | NULL | 70 | 121 |
| AT5G17510.1 | Seg | seg | seg | NULL | 15 | 51 |
| AT5G17510.1 | superfamily | SSF47175 | Cytochromes | IPR010980 | 12 | 151 |

TABLE C19
InterPro scan results (major accession numbers) of the AT5G23690 polypeptide.

| AN3 | | | | InterPro | amino acid | amino acid |
|---|---|---|---|---|---|---|
| interactor | Database | Domain accession | Domain name | accession | start coordinate | end coordinate |
| AT5G23690.1 | superfamily | SSF81891 | Poly A polymerase C-terminal | NULL | 224 | 443 |
| | | | region-like | | | |
| AT5G23690.1 | superfamily | SSF81301 | Nucleotidyltransferase | NULL | 76 | 223 |
| AT5G23690.1 | Seg | seg | seg | NULL | 240 | 252 |
| AT5G23690.1 | HMMPanther | PTHR13734:SF12 | POLY(A) POLYMERASE, | NULL | 112 | 523 |
| | | | ARABIDOPSIS | | | |
| AT5G23690.1 | HMMPanther | PTHR13734 | TRNA-NUCLEO- | NULL | 112 | 523 |
| | | | TIDYLTRANSFERASE/POLY(A) | | | |
| | | | POLYMERASE FAMILY MEMBER | | | |
| AT5G23690.1 | Gene3D | G3DSA:3.30.460.10no | description | NULL | 66 | 223 |
| AT5G23690.1 | Gene3D | G3DSA:1.10.3090.10no | description | NULL | 224 | 316 |
| AT5G23690.1 | ScanRegExp | PS00012 | PHOSPHOPANTETHEINE | IPR006162 | 71 | 86 |
| AT5G23690.1 | HMMPfam | PF01743 | PolyA_pol | IPR002646 | 97 | 226 |
| AT5G23690.1 | ScanRegExp | PS00014 | ER_TARGET | IPR000886 | 524 | 527 |

TABLE C20
InterPro scan results (major accession numbers) of the AT5G53480 polypeptide.

| AN3 | | | | InterPro | amino acid | amino acid |
|---|---|---|---|---|---|---|
| interactor | Database | Domain accession | Domain name | accession | start coordinate | end coordinate |
| AT5G53480.1 | HMMPanther | PTHR10527:SF1 | PTHR10527:SF1 | NULL | 217 | 869 |
| AT5G53480.1 | HMMPanther | PTHR10527:SF1 | PTHR10527:SF1 | NULL | 217 | 869 |
| AT5G53480.1 | HMMPanther | PTHR10527 | PTHR10527 | NULL | 217 | 869 |
| AT5G53480.1 | HMMPanther | PTHR10527 | PTHR10527 | NULL | 217 | 869 |
| AT5G53480.1 | superfamily | SSF48371 | ARM-type_fold | IPR016024 | 3 | 864 |
| AT5G53480.1 | Gene3D | G3DSA:1.25.10.10ARM- | | IPR011989 | 3 | 866 |
| | | like | | | | |
| AT5G53480.1 | ProfileScan | PS50166 | IMPORTIN_B_NT | IPR001494 | 23 | 103 |
| AT5G53480.1 | HMMPfam | PF03810 | IBN_N | IPR001494 | 23 | 103 |
| AT5G53480.1 | HMMPfam | PF02985 | HEAT | IPR000357 | 404 | 441 |
| AT5G53480.1 | HMMPfam | PF02985 | HEAT | IPR000357 | 362 | 398 |
| AT5G53480.1 | HMMPfam | PF02985 | HEAT | IPR000357 | 214 | 250 |

### Example 19

### Topology Prediction of the iSYT Polypeptide Sequences

[0359] TargetP 1.1 predicts the subcellular location of eukaryotic proteins. The location assignment is based on the predicted presence of any of the N-terminal pre-sequences: chloroplast transit peptide (cTP), mitochondrial targeting peptide (mTP) or secretory pathway signal peptide (SP). Scores on which the final prediction is based are not really probabilities, and they do not necessarily add to one. However, the location with the highest score is the most likely according to TargetP, and the relationship between the scores (the reliability class) may be an indication of how certain the prediction is. The reliability class (RC) ranges from 1 to 5, where 1 indicates the strongest prediction. TargetP is maintained at the server of the Technical University of Denmark.

[0360] For the sequences predicted to contain an N-terminal presequence a potential cleavage site can also be predicted.

[0361] A number of parameters is selected, such as organism group (non-plant or plant), cutoff sets (none, predefined set of cutoffs, or user-specified set of cutoffs), and the calculation of prediction of cleavage sites (yes or no).

[0362] Many other algorithms can be used to perform such analyses, including:
[0363] ChloroP 1.1 hosted on the server of the Technical University of Denmark;
[0364] Protein Prowler Subcellular Localisation Predictor version 1.2 hosted on the server of the Institute for Molecular Bioscience, University of Queensland, Brisbane, Australia;
[0365] PENCE Proteome Analyst PA-GOSUB 2.5 hosted on the server of the University of Alberta, Edmonton, Alberta, Canada;
[0366] TMHMM, hosted on the server of the Technical University of Denmark
[0367] PSORT (URL: psort.org)
[0368] PLOC (Park and Kanehisa, Bioinformatics, 19, 1656-1663, 2003).

### Example 20

### Cloning of the iSYT Encoding Nucleic Acid Sequence

[0369] The method was adapted from the Multisite Gateway® Pro (Invitrogen™).

[0370] Each plant transformation vector was constructed in two steps: First, the two coding sequences of gene of interest were amplified from the cDNA obtained from the appropriate source using a high-fidelity PCR. To this end primers were designed and synthesized using standard methods. Then the sequences were cloned in pDONR201P1-P4 and pDONR201 P3-P2 (Invitrogen™), respectively, using the Gateway™ BP (Invitrogen™) standard reaction method. The resulting clone was called the Entry Clone (EC), in accordance with Gateway method terminology. The other entry clone that carried a terminator and a promoter was produced by using pDONR201P4r-P3r. The identity of the clone was verified by restriction digestion analysis and complete sequencing of the insert. After verification, the clone (EC) went through a second Gateway method step which allows transfer of the inserts of all 3 ECs to the so-called Destination Vector (DV) using the Gateway LR (Invitrogen™) standard reaction method. On the destination vector, a promoter and a terminator designed for stacking genes were already in place. The identity of the resulting clone was verified by restriction digestion analysis and then by sequencing. After this verification, this binary vector was used as plant transformation vector. The plant transformation vector contains following functional cassettes in its t-DNA region: the selectable marker gene, the visual (reporter) marker gene, and two genes of interest. Each of these genes was driven by its corresponding promoter and terminator. The binary vector is then cloned into a disarmed Agrobacterium tumefaciens which is used to transform rice.

### Example 21

### Plant Transformation

### Rice Transformation

[0371] The Agrobacterium containing the expression vector is used to transform Oryza sativa plants. Mature dry seeds of the rice japonica cultivar Nipponbare are dehusked. Sterilization is carried out by incubating for one minute in 70% ethanol, followed by 30 minutes in 0.2% HgCl₂, followed by a 6 times 15 minutes wash with sterile distilled water. The sterile seeds are then germinated on a medium containing 2,4-D (callus induction medium). After incubation in the dark for four weeks, embryogenic, scutellum-derived calli are excised and propagated on the same medium. After two weeks, the calli are multiplied or propagated by subculture on the same medium for another 2 weeks. Embryogenic callus pieces are sub-cultured on fresh medium 3 days before co-cultivation (to boost cell division activity).

[0372] Agrobacterium strain LBA4404 containing the expression vector is used for co-cultivation. Agrobacterium was inoculated on AB medium with the appropriate antibiotics and cultured for 3 days at 28° C. The bacteria are then collected and suspended in liquid co-cultivation medium to a density (OD₆₀₀) of about 1. The suspension is then transferred to a Petri dish and the calli immersed in the suspension for 15 minutes. The callus tissues are then blotted dry on a filter paper and transferred to solidified, co-cultivation medium and incubated for 3 days in the dark at 25° C. Co-cultivated calli are grown on 2,4-D-containing medium for 4 weeks in the dark at 28° C. in the presence of a selection agent. During this period, rapidly growing resistant callus islands developed. After transfer of this material to a regeneration medium and incubation in the light, the embryogenic potential is released and shoots developed in the next four to five weeks. Shoots are excised from the calli and incubated for 2 to 3 weeks on an auxin-containing medium from which they are transferred to soil. Hardened shoots era grown under high humidity and short days in a greenhouse.

[0373] Approximately 35 independent T0 rice transformants are generated for one construct. The primary transformants are transferred from a tissue culture chamber to a greenhouse. After a quantitative PCR analysis to verify copy number of the T-DNA insert, only single copy transgenic plants that exhibit tolerance to the selection agent are kept for harvest of T1 seed. Seeds are then harvested three to five months after transplanting. The method yielded single locus transformants at a rate of over 50% (Aldemita and Hodges 1996, Chan et al. 1993, Hiei et al. 1994).

### Example 22

### Transformation of Other Crops

### Corn Transformation

[0374] Transformation of maize (Zea mays) is performed with a modification of the method described by Ishida et al. (1996) Nature Biotech 14(6): 745-50. Transformation is genotype-dependent in corn and only specific genotypes are amenable to transformation and regeneration. The inbred line A188 (University of Minnesota) or hybrids with A188 as a parent are good sources of donor material for transformation, but other genotypes can be used successfully as well. Ears are harvested from corn plant approximately 11 days after pollination (DAP) when the length of the immature embryo is about 1 to 1.2 mm. Immature embryos are cocultivated with Agrobacterium tumefaciens containing the expression vector, and transgenic plants are recovered through organogenesis. Excised embryos are grown on callus induction medium, then maize regeneration medium, containing the selection agent (for example imidazolinone but various selection markers can be used). The Petri plates are incubated in the light at 25° C. for 2-3 weeks, or until shoots develop. The green shoots are transferred from each embryo to maize rooting medium and incubated at 25° C. for 2-3 weeks, until roots develop. The rooted shoots are transplanted to soil in the greenhouse. T1 seeds are produced from plants that exhibit tolerance to the selection agent and that contain a single copy of the T-DNA insert.

### Wheat Transformation

[0375] Transformation of wheat is performed with the method described by Ishida et al. (1996) Nature Biotech 14(6): 745-50. The cultivar Bobwhite (available from CIMMYT, Mexico) is commonly used in transformation. Immature embryos are co-cultivated with Agrobacterium tumefaciens containing the expression vector, and transgenic plants are recovered through organogenesis. After incubation with Agrobacterium, the embryos are grown in vitro on callus induction medium, then regeneration medium, containing the selection agent (for example imidazolinone but various selection markers can be used). The Petri plates are incubated in the light at 25° C. for 2-3 weeks, or until shoots develop. The green shoots are transferred from each embryo to rooting medium and incubated at 25° C. for 2-3 weeks, until roots develop. The rooted shoots are transplanted to soil in the greenhouse. T1 seeds are produced from plants that exhibit tolerance to the selection agent and that contain a single copy of the T-DNA insert.

### Soybean Transformation

[0376] Soybean is transformed according to a modification of the method described in the Texas A&M U.S. Pat. No. 5,164,310. Several commercial soybean varieties are amenable to transformation by this method. The cultivar Jack (available from the Illinois Seed foundation) is commonly used for transformation. Soybean seeds are sterilised for in vitro sowing. The hypocotyl, the radicle and one cotyledon are excised from seven-day old young seedlings. The epicotyl and the remaining cotyledon are further grown to develop axillary nodes. These axillary nodes are excised and incubated with Agrobacterium tumefaciens containing the expression vector. After the cocultivation treatment, the explants are washed and transferred to selection media. Regenerated shoots are excised and placed on a shoot elongation medium. Shoots no longer than 1 cm are placed on rooting medium until roots develop. The rooted shoots are transplanted to soil in the greenhouse. T1 seeds are produced from plants that exhibit tolerance to the selection agent and that contain a single copy of the T-DNA insert.

### Rapeseed/Canola Transformation

[0377] Cotyledonary petioles and hypocotyls of 5-6 day old young seedling are used as explants for tissue culture and transformed according to Babic et al. (1998, Plant Cell Rep 17: 183-188). The commercial cultivar Westar (Agriculture Canada) is the standard variety used for transformation, but other varieties can also be used. Canola seeds are surface-sterilized for in vitro sowing. The cotyledon petiole explants with the cotyledon attached are excised from the in vitro seedlings, and inoculated with Agrobacterium (containing the expression vector) by dipping the cut end of the petiole explant into the bacterial suspension. The explants are then cultured for 2 days on MSBAP-3 medium containing 3 mg/l BAP, 3% sucrose, 0.7 Phytagar at 23° C., 16 hr light. After two days of co-cultivation with Agrobacterium, the petiole explants are transferred to MSBAP-3 medium containing 3 mg/l BAP, cefotaxime, carbenicillin, or timentin (300 mg/l) for 7 days, and then cultured on MSBAP-3 medium with cefotaxime, carbenicillin, or timentin and selection agent until shoot regeneration. When the shoots are 5-10 mm in length, they are cut and transferred to shoot elongation medium (MSBAP-0.5, containing 0.5 mg/l BAP). Shoots of about 2 cm in length are transferred to the rooting medium (MS0) for root induction. The rooted shoots are transplanted to soil in the greenhouse. T1 seeds are produced from plants that exhibit tolerance to the selection agent and that contain a single copy of the T-DNA insert.

### Alfalfa Transformation

[0378] A regenerating clone of alfalfa (Medicago sativa) is transformed using the method of (McKersie et al., 1999 Plant Physiol 119: 839-847). Regeneration and transformation of alfalfa is genotype dependent and therefore a regenerating plant is required. Methods to obtain regenerating plants have been described. For example, these can be selected from the cultivar Rangelander (Agriculture Canada) or any other commercial alfalfa variety as described by Brown DCW and A Atanassov (1985. Plant Cell Tissue Organ Culture 4: 111-112). Alternatively, the RA3 variety (University of Wisconsin) has been selected for use in tissue culture (Walker et al., 1978 Am J Bot 65:654-659). Petiole explants are cocultivated with an overnight culture of Agrobacterium tumefaciens C58C1 pMP90 (McKersie et al., 1999 Plant Physiol 119: 839-847) or LBA4404 containing the expression vector. The explants are cocultivated for 3 d in the dark on SH induction medium containing 288 mg/L Pro, 53 mg/L thioproline, 4.35 g/L K2SO4, and 100 μm acetosyringinone. The explants are washed in half-strength Murashige-Skoog medium (Murashige and Skoog, 1962) and plated on the same SH induction medium without acetosyringinone but with a suitable selection agent and suitable antibiotic to inhibit Agrobacterium growth. After several weeks, somatic embryos are transferred to BOi2Y development medium containing no growth regulators, no antibiotics, and 50 g/L sucrose. Somatic embryos are subsequently germinated on half-strength Murashige-Skoog medium. Rooted seedlings were transplanted into pots and grown in a greenhouse. T1 seeds are produced from plants that exhibit tolerance to the selection agent and that contain a single copy of the T-DNA insert.

### Cotton Transformation

[0379] Cotton is transformed using Agrobacterium tumefaciens according to the method described in U.S. Pat. No. 5,159,135. Cotton seeds are surface sterilised in 3% sodium hypochlorite solution during 20 minutes and washed in distilled water with 500 μg/ml cefotaxime. The seeds are then transferred to SH-medium with 50 μg/ml benomyl for germination. Hypocotyls of 4 to 6 days old seedlings are removed, cut into 0.5 cm pieces and are placed on 0.8% agar. An Agrobacterium suspension (approx. 108 cells per ml, diluted from an overnight culture transformed with the gene of interest and suitable selection markers) is used for inoculation of the hypocotyl explants. After 3 days at room temperature and lighting, the tissues are transferred to a solid medium (1.6 g/l Gelrite) with Murashige and Skoog salts with B5 vitamins (Gamborg et al., Exp. Cell Res. 50:151-158 (1968)), 0.1 mg/l 2,4-D, 0.1 mg/l 6-furfurylaminopurine and 750 μg/ml MgCL2, and with 50 to 100 μg/ml cefotaxime and 400-500 μg/ml carbenicillin to kill residual bacteria. Individual cell lines are isolated after two to three months (with subcultures every four to six weeks) and are further cultivated on selective medium for tissue amplification (30° C., 16 hr photoperiod). Transformed tissues are subsequently further cultivated on non-selective medium during 2 to 3 months to give rise to somatic embryos. Healthy looking embryos of at least 4 mm length are transferred to tubes with SH medium in fine vermiculite, supplemented with 0.1 mg/l indole acetic acid, 6 furfurylaminopurine and gibberellic acid. The embryos are cultivated at 30° C. with a photoperiod of 16 hrs, and plantlets at the 2 to 3 leaf stage are transferred to pots with vermiculite and nutrients. The plants are hardened and subsequently moved to the greenhouse for further cultivation.

### Example 23

### Phenotypic Evaluation Procedure

### 23.1 Evaluation Setup

[0380] Approximately 35 independent TO rice transformants are generated. The primary transformants are transferred from a tissue culture chamber to a greenhouse for growing and harvest of T1 seed. Events, of which the T1 progeny segregated 3:1 for presence/absence of the transgene, are retained. For each of these events, approximately 10 T1 seedlings containing the transgene (hetero- and homo-zygotes) and approximately 10 T1 seedlings lacking the transgene (nullizygotes) are selected by monitoring visual marker expression. The transgenic plants and the corresponding nullizygotes are grown side-by-side at random positions. Greenhouse conditions are of shorts days (12 hours light), 28° C. in the light and 22° C. in the dark, and a relative humidity of 70%. Plants grown under non-stress conditions are watered at regular intervals to ensure that water and nutrients are not limiting and to satisfy plant needs to complete growth and development.

[0381] T1 events are further evaluated in the T2 generation following the same evaluation procedure as for the T1 generation but with more individuals per event. From the stage of sowing until the stage of maturity the plants are passed several times through a digital imaging cabinet. At each time point digital images (2048×1536 pixels, 16 million colours) are taken of each plant from at least 6 different angles.

### Drought Screen

[0382] Plants from T2 seeds are grown in potting soil under normal conditions until they approached the heading stage. They are then transferred to a “dry” section where irrigation is withheld. Humidity probes are inserted in randomly chosen pots to monitor the soil water content (SWC). When SWC goes below certain thresholds, the plants are automatically re-watered continuously until a normal level is reached again. The plants are then re-transferred again to normal conditions. The rest of the cultivation (plant maturation, seed harvest) is the same as for plants not grown under abiotic stress conditions. Growth and yield parameters are recorded as detailed for growth under normal conditions.

### Nitrogen Use Efficiency Screen

[0383] Rice plants from T2 seeds are grown in potting soil under normal conditions except for the nutrient solution. The pots are watered from transplantation to maturation with a specific nutrient solution containing reduced N nitrogen (N) content, usually between 7 to 8 times less. The rest of the cultivation (plant maturation, seed harvest) is the same as for plants not grown under abiotic stress. Growth and yield parameters are recorded as detailed for growth under normal conditions.

### Salt Stress Screen

[0384] Plants are grown on a substrate made of coco fibers and argex (3 to 1 ratio). A normal nutrient solution is used during the first two weeks after transplanting the plantlets in the greenhouse. After the first two weeks, 25 mM of salt (NaCl) is added to the nutrient solution, until the plants are harvested. Seed-related parameters are then measured.

### 23.2 Statistical Analysis: F Test

[0385] A two factor ANOVA (analysis of variants) is used as a statistical model for the overall evaluation of plant phenotypic characteristics. An F test is carried out on all the parameters measured of all the plants of all the events transformed with the gene of the present invention. The F test is carried out to check for an effect of the gene over all the transformation events and to verify for an overall effect of the gene, also known as a global gene effect. The threshold for significance for a true global gene effect is set at a 5% probability level for the F test. A significant F test value points to a gene effect, meaning that it is not only the mere presence or position of the gene that is causing the differences in phenotype.

### 23.3 Parameters Measured

### Biomass-Related Parameter Measurement

[0386] From the stage of sowing until the stage of maturity the plants are passed several times through a digital imaging cabinet. At each time point digital images (2048×1536 pixels, 16 million colours) are taken of each plant from at least 6 different angles.

[0387] The plant aboveground area (or leafy biomass) is determined by counting the total number of pixels on the digital images from aboveground plant parts discriminated from the background. This value is averaged for the pictures taken on the same time point from the different angles and was converted to a physical surface value expressed in square mm by calibration. Experiments show that the aboveground plant area measured this way correlates with the biomass of plant parts above ground. The above ground area is the area measured at the time point at which the plant had reached its maximal leafy biomass. The early vigour is the plant (seedling) aboveground area three weeks post-germination. Increase in root biomass is expressed as an increase in total root biomass (measured as maximum biomass of roots observed during the lifespan of a plant); or as an increase in the root/shoot index (measured as the ratio between root mass and shoot mass in the period of active growth of root and shoot).

[0388] Early vigour is determined by counting the total number of pixels from aboveground plant parts discriminated from the background. This value was averaged for the pictures taken on the same time point from different angles and was converted to a physical surface value expressed in square mm by calibration. The results described below are for plants three weeks post-germination.

### Seed-Related Parameter Measurements

[0389] The mature primary panicles are harvested, counted, bagged, barcode-labelled and then dried for three days in an oven at 37° C. The panicles are then threshed and all the seeds are collected and counted. The filled husks are separated from the empty ones using an air-blowing device. The empty husks are discarded and the remaining fraction was counted again. The filled husks were weighed on an analytical balance. The number of filled seeds is determined by counting the number of filled husks that remained after the separation step. The total seed yield is measured by weighing all filled husks harvested from a plant. Total seed number per plant is measured by counting the number of husks harvested from a plant. Thousand Kernel Weight (TKW) is extrapolated from the number of filled seeds counted and their total weight. The Harvest Index (HI) in the present invention is defined as the ratio between the total seed yield and the above ground area (mm²), multiplied by a factor 10⁶. The total number of flowers per panicle as defined in the present invention is the ratio between the total number of seeds and the number of mature primary panicles. The seed fill rate as defined in the present invention is the proportion (expressed as a %) of the number of filled seeds over the total number of seeds (or florets).

### Examples 24

### Results of the Phenotypic Evaluation of the Transgenic Plants

[0390] Transgenic rice plants expressing a nucleic acid comprising the Open Reading Frame of at least two genes encoding an iSYT polypeptide are evaluated under one or more of the conditions abovementioned (non-stress conditions, drought stress, Nitrogene deficiency). The performance of the transgenic plants outperform the control plants in one or more yield-related traits selected from aboveground biomass (AreaMax), root biomass (RootMax and RootThickMax), and for seed yield (total weight of seeds, number of filled seeds, fill rate, harvest index) and thousand kernel weight. In addition, plants expressing In addition, the transgenic plants comprising recombinant nucleic acids expressing at least two iSYT polypeptides or homologues thereof or fusions of the same show a faster growth rate (a shorter time (in days) needed between sowing and the day the plant reaches 90% of its final biomass (AreaCycle) and an earlier start of flowering (TimetoFlower: time (in days) between sowing and the emergence of the first panicle).

1. A method for enhancing a yield-related trait in a plant relative to a control plant, comprising modulating expression in a plant of:
(i) any two or three nucleic acids encoding the corresponding two or three interactor of synovial sarcoma translocation (iSYT)-like polypeptides; or
(ii) two or three nucleic acids, each encoding a single iSYT-like polypeptide; or
(iii) the nucleic acids of (i) and the nucleic acids of (ii),
wherein said iSYT-like polypeptide is selected from the group consisting of any of the polypeptides of Table A, homologues thereof, and fusions of the same.

2. The method of claim 1 wherein at least one of the polypeptides is a synovial sarcoma translocation (SYT) polypeptide or a homologue thereof, said SYT polypeptide or homologue thereof comprising an SNH domain having at least 40% sequence identity to the SNH domain of SEQ ID NO: 670 (IQQYLDENKSLILKIVESQNSGKLSECAENQARL QRNLMYLAAIAD).

3. The method of claim 1 wherein the nucleic acids encode the corresponding polypeptides selected from the group consisting of the polypeptides listed in Table 3.

4. The method of claim 1, wherein the modulated expression is effected by introducing and expressing the nucleic acids in a plant.

5. The method of claim 1, wherein the nucleic acids are selected from the group consisting of the nucleic acids encoding any of the proteins listed in Table A and Tables A2 to Table A26, or is a portion of such a nucleic acid, or a nucleic acid capable of hybridising with such a nucleic acid.

6. The method of claim 1, wherein the nucleic acids encode an orthologue or paralogue of any of the proteins given in Table A.

7. The method of claim 1, wherein the enhanced yield-related trait comprises increased yield, increased biomass and/or increased seed yield relative to a control plant.

8. The method of claim 1, wherein the enhanced yield-related trait is obtained under non-stress conditions.

9. The method of claim 1, wherein the enhanced yield-related trait is obtained under conditions of drought stress, salt stress or nitrogen deficiency.

10. The method of claim 4, wherein the nucleic acids are operably linked to a plant promoter, a constitutive promoter, a GOS2 promoter, or a GOS2 promoter from rice.

11. The method of claim 1, wherein the nucleic acids are of plant origin.

12. A plant or part thereof obtained by the method of claim 1, wherein said plant or part thereof comprises any two or three nucleic acids encoding the corresponding two or three polypeptides selected from the group consisting of the polypeptides listed in Table A, homologues thereof, and fusions of the same.

13. A construct comprising:
(i) any two or three nucleic acids encoding the corresponding two or three polypeptides selected from the group consisting of any of the polypeptides listed in Table A or homologues thereof and fusions of the same;
(ii) one or more control sequences capable of driving expression of the nucleic acid sequence of (i), wherein the one or more control sequences comprises a plant promoter, a constitutive promoter, a GOS2 promoter, or a GOS2 promoter from rice; and optionally
(iii) a transcription termination sequence.

14. The construct of claim 12, wherein the nucleic acids of (i) encode two or three polypeptides selected from the group consisting of the polypeptides listed in Table 3.

15. A method for making a plant having increased yield, increased biomass and/or increased seed yield relative to a control plant, comprising transforming a plant, plant part, or plant cell with the construct of claim 13.

16. A plant, plant part or plant cell comprising the construct of claim 13.

17. A method for the production of a transgenic plant having increased yield, increased biomass, and/or increased seed yield relative to a control plant, comprising:
(i) introducing and expressing in a plant or plant cell any two or three nucleic acids encoding the corresponding polypeptides selected from the group consisting of any of the polypeptides of Table A or homologues thereof and fusions of the same; and
(ii) cultivating the plant or plant cell under conditions promoting plant growth and development.

18. A transgenic plant having increased yield, increased biomass, and/or increased seed yield, relative to a control plant, resulting from modulated expression of any two or three nucleic acids encoding the corresponding polypeptides selected from the group consisting of any of the polypeptides of Table A or homologues thereof and fusions of the same, or a transgenic plant cell derived from said transgenic plant.

19. The transgenic plant of claim 16, or a transgenic plant cell or transgenic plant part derived thereof, wherein said plant is a crop plant, a monocot, a cereal, rice, maize, wheat, barley, millet, rye, triticale, sorghum, emmer, spelt, secale, einkorn, teff, milo, or oats.

20. Harvestable parts of the plant of claim 19, wherein said harvestable parts are shoot biomass and/or seeds.

21. Products derived from the plant of claim 19 and/or from harvestable parts thereof.

22. The construct of claim 12, wherein the nucleic acids of (i) encode two polypeptides selected from the group consisting of the combinations of Table 3.

23-24. (canceled)

25. A method for the production of a transgenic plant having increased yield, increased biomass, and/or increased seed yield relative to a control plant, comprising:
(i) introducing and expressing in a plant or plant cell one or more isolated nucleic acids encoding at least one polypeptide selected from the group consisting of any of the polypeptides of Table A, homologues thereof, and fusions of the same; and
(ii) cultivating the plant or plant cell under conditions promoting plant growth and development.

26. A transgenic plant having increased yield, increased biomass, and/or increased seed yield, relative to a control plant, resulting from modulated expression of one or more isolated nucleic acids encoding at least one polypeptide selected from the group consisting of any of the polypeptides of Table A, homologues thereof, and fusions of the same, or a transgenic plant cell derived from said transgenic plant.

27. The transgenic plant of claim 18, or a transgenic plant cell or transgenic plant part derived thereof, wherein said plant is a crop plant, a monocot, a cereal, rice, maize, wheat, barley, millet, rye, triticale, sorghum emmer, spelt, secale, einkorn, teff, milo, or oats.

28. Harvestable parts of the plant of claim 18, wherein said harvestable parts are shoot biomass and/or seeds.

29. Products derived from the plant of claim 18 and/or from harvestable parts thereof.

30. A method for increasing yield, seed yield, and/or shoot biomass in a plant, relative to a control plant, comprising transforming a plant, plant part, or plant cell with two or three nucleic acids encoding two or three polypeptides selected from the group consisting of any of the polypeptides of Table A, homologues thereof, and fusions of the same.

The application's sequence listing, which the Patent Office published only in electronic form, follows.

SEQUENCE LISTING (670 sequences)

SEQ ID NO: 1 - DNA, 1166 bp, Arabidopsis thaliana
  misc_feature (386)..(386): r can be a or g
  misc_feature (425)..(425): y can be t or c
aacgcaaaacaacttttgtggaggagagaaagcgagataacacacacacagagatacacatcttcaatagttaagagttttctatatacagaagcatagaggaaagagagagagacagatacaaaagttaatatctctctctctcacttggtgagacttctctttttcctctgggttttgtggtgggggttgtctctataaaaacttatatatataaaatatataaataaataagaaggaattatcaggttttatataaaatagcaaaagaaatgcaacagcacctgatgcagatgcagcccatgatggctggttactaccccagcaatgttacctctgatcatatccaacagtacttggacgaaaacaaatcgttgattctgaarattgttgagtctcaaaactctggaaagcttagcgaatgygccgagaatcaagcaaggcttcaacgcaacctaatgtacctagctgcaatagcagattctcagcctcagccaccaagtgtgcatagccagtatggatctgctggtggtgggatgattcagggagaaggagggtcacactatttgcagcagcaacaagcgactcaacagcaacagatgactcagcagtctctaatggcggctcgatcttcaatgttgtatgctcagcaacagcagcagcagcagccttacgcgacgcttcagcatcagcaattgcaccatagccagcttggaatgagctcgagcagcggaggaggaggaagcagtggtctccatatccttcagggagaggctggtgggtttcatgattttggccgtgggaagccggaaatgggaagtggtggtggcggtgaaggcagaggaggaagttcaggggatggtggagaaaccctttacttgaaatcatcagatgatgggaattgaaagagtgtggcacaaggaatcttaatgatgaagcagcagcagcagcagaagaagtagtagtaataataggagtcttgaagttagtgtgttttggttttagttgcttgttgaagaagcaaagaactctttatttacttctttttagttttgttattctctctatgtttgttccctaaaacagtgaacctctttcgtggtagtgtaccatgtaaatctgctggctccaagttgtgtcgtaatcttaatatgttatttctctga

SEQ ID NO: 2 - protein, 210 aa, Arabidopsis thaliana
  MISC_FEATURE (129)..(129): Xaa is Gln or Arg
  MISC_FEATURE (142)..(142): Xaa is Leu or Ser
MQQHLMQMQPMMAGYYPSNVTSDHIQQYLDENKSLILKIVESQNSGKLSECAENQARLQRNLMYLAAIADSQPQPPSVHSQYGSAGGGMIQGEGGSHYLQQQQATQQQQMTQQSLMAARSSMLYAQQQXQQQPYATLQHQQXHHSQLGMSSSSGGGGSSGLHILQGEAGGFHDFGRGKPEMGSGGGGEGRGGSSGDGGETLYLKSSDDGN

SEQ ID NO: 3 - DNA, 1546 bp, Arabidopsis thaliana
atgggaaagaaagagcagaaggatcatcattcagtagtagagagcgacgacaaagtcgaagctgttcttcatctccttcgtaaacattctcctctaactcttaaacaggagaagttctgtaacagagcttgtgtcggtagattcttgagaataaaaggagacaatgtgaagaaagcagctaaacagttaaggtcttgcctttcatggagatcttctcttggcattgagagtttgatcgccgatgagttcacggcggagcttgctgaaggtcttgcctacgtcgctggtcttgacgacgagtgtagacccgttttggttttccgcattaaacaagattatcagaagctacatacgcagaaacagttgacacgtttggtggtatttacattagaggttgctatctcaaccatgtccagaaacgtcgaacaatttgtcatccttttcgatgctattgcagcagcagtacttctcgtaactctgatagtactctttagcttttcattaaatgttcctcttttgatcctctgcaattccactgcacaccttcctttttttttctttttttttatttataaaacaaacccaaagcttcttcaaatcagcatcagctttcatgaacatacttgtgactacactcaaaatagtcgcagaggtattcgcacattcgtggatctatcaacggctacgatgattgtatcaatgcaagattttcaagactcgtttgactacgacgatttctcgtcatcatacccatcacgagtctcctccctacgattcgacacgtcatcactaaaatcaacggacaagatcggctcatgcgcatcctctaggttcgctttcaccgtatctcgcgacggactcgacacagtcaaaccatggtgtctcacgttgactgacacgtcatcaaccaaactaggacacaacacaggcgcgtacatctcaccgcttaacgcgcgttctttctctttcgcgtcaccggcggctagaagcgagccattcggtggtccaaggaggagcttcttcgcttccactccgatgccagctaggaccaccgaccgtcactctatcggaaccctacgggacccgcggatacctcgcccgtctttcttccaatctccggcgattttcttccggcgagagtcacacgtcagcaaaagtgagaaaccacgagattcgttcgttcagtttctcaagttttatcgtagaccgtacgatgagatgacttataggtcaaagatgaggccaccgctcggtggtcttgtatccattgtttcaactcagattagacgccgtcacgtgtctttatcccaacggttctaactcaaaaactatccacctattaaagtagtatataacttttgccgtgttttttttttttttaacttattgcaatgtttctatcatttttagttcgtcaagtgtatttttctaataattttgattaattgtttatttatcaagcatttttatatggttttgatttcaattatttatctaaattgttcaaagtgaaagtcgtaccgtttgaagtttgaatgctttgtat

SEQ ID NO: 4 - protein, 439 aa, Arabidopsis thaliana
MGKKEQKDHHSVVESDDKVEAVLHLLRKHSPLTLKQEKFCNRACVGRFLRIKGDNVKKAAKQLRSCLSWRSSLGIESLIADEFTAELAEGLAYVAGLDDECRPVLVFRIKQDYQKLHTQKQLTRLVVFTLEVAISTMSRNVEQFVILFDAIAAAVLLVTLIVLFSFSLNVPLLILCNSTAHLPFFFFFFIYKTNPKLLQISISFHEHTCDYTQNSRRGIRTFVDLSTATMIVSMQDFQDSFDYDDFSSSYPSRVSSLRFDTSSLKSTDKIGSCASSRFAFTVSRDGLDTVKPWCLTLTDTSSTKLGHNTGAYISPLNARSFSFASPAARSEPFGGPRRSFFASTPMPARTTDRHSIGTLRDPRIPRPSFFQSPAIFFRRESHVSKSEKPRDSFVQFLKFYRRPYDEMTYRSKMRPPLGGLVSIVSTQIRRRHVSLSQRF

SEQ ID NO: 5 - DNA, 4739 bp, Arabidopsis thaliana
atggtacgtgaatgttttactttccttaacatctttgtgttacatagcataggttctcatgtttggtttgaagaccctgaagtggcttggattgatggtgaggttgaaaaaatcaatggacaagaagttgtcatccaagccactactggaaaaaaggtcactgcaaagttgtcaaagatttaccctaaggatgtggaagctcctgctggtggtgttgatgacatgacaaaactctcttacttgcatgaacctggtgttcttcagaacttgaagatcagatatgaacttaatgagatctatacatacacaggaaacatccttattgcgattaatccgtttcaacgattgcctcacatctatgatgcccatatgatgcaacaatacaaaggagcaccattgggagaactaagtcctcatgtttttgctgttgctgatgttgcatacagggccatgattaatgagggaaaaagcaattcaattcttgtaagtggtgagagcggagctggaaaaactgaaaccactaagatgcttatgagatatcttgcatacttgggaggtcgtgctgttacagaaggacggactgttgaacaacaagttcttgaatcaaatcccgtccttgaagcctttgggaacgcaaaaactgtgaggaataacaattcaagtcgcttcggtaaatttgttgaaatccaatttgataagcaaggaagaatatctggagctgctatacggacctatcttctagagaggtctcgtgtgtgtcaaatctctgatcccgaacgaaattaccattgcttctatcttctttgtgccgcaccgcaggaggaaattgaaaagtacaagctcggtcatccaaagacttttcattatctgaaccagtccaagtgcttcgagcttgttggtataagcgatgctcatgattatcttgcgacaagaagagctatggatattgttggaattagcgaaaaggaacaggaagcaattttcagggtggttgcagcaattcttcacattggaaacatcgattttactaagggaaaggaagtggattcatcagttcccaaggatgagaagtcgaaatttcatcttaaaacagcagcagaacttctcatgtgtgatttaaaggcacttgaagatgcattatgtaaacgagttatgatcacacccgaggaagttatcaagagaagtcttgatccacagagtgctgtaaccagcagagacggtctcgctaagacagtctattctcgattgttcgattggttggtagacaagattaataagtcgattggacaagatgccaattctagatctctaattggagttctggacatttacggatttgagagcttcaaaactaacagttttgaacagttctgtattaatttcactaatgagaagttgcagcaacattttaatcagcacgttttcaagatggaacaggaagagtacacaaaagaagcaatagattggagttacattgaatttgtggacaatcaagatgttctcgatctcatagaaaagaagcctggtggaattgttgctctcctcgatgaagcttgcatgtttccaaagtcaacccacgaaacatttgcaaataagctgtatcagacttttaagacacacaagcggttcatcaaaccaaaactctctcgaacagatttcgctgttgcccattatgctggagaagttctatatcagtctgaactatttctggataaaaacaaggattatgtgatccctgaacaccaagatttgttgggggcttccaaatgtccctttgttgtgggtcttttccctccactcccagaagaaacatctaaatcgtcaaagttttcatccattggttctcgctttaagctgcaactccagcaactgatggaaacattaaattgcaccgagcctcattacatcagatgtgtgaagcctaacaatcttctaaagcctgccatatttgagaatgtgaacatcatgcagcaactgcgatgtggtggtgttttagaggcgatcagaattagttgtgcagggtatccaactcgtaaacctttctttgagttcataaaccgttttggacttctatctcctgctgctttagaagggaacttcgatgagaaagtcgcatgtcaaaagatcttggataacatgggactcaaaggataccagattggtaaaacaaaggtcttcttgagggctggtcagatggctgaactcgacgctagaagggctgaggttctaagtagtgctgcaaaaaaaattcagcgacgtatacgtactcatcaagctcagaaacggttcattgttctgagaaaagccaccatttctcttcaagctatatgtagaggaagactttcctgcaaacattacgataatttgagacgagaagctgctgctgtgaagattcagaagaatggtcggagacattattctagaaaatcatataaaaaactccatgtagcttctcttgttgtacagactggtttaagagcaatggctgctcgtaaacaattcagattcaggaagcaaacaaaggctgccacaattgttcaggctcagtggcgttgtcacagagcaatctcgtactacaaaaagcttaaaaatggagtggtcctatctcagacacgatggagaggcagacttgctaagagagaacttaggaagctcaaaatggctgcaagggaaacaggagcacttaaagaggcaaaggatatgcttgaaaagaaagtcgaggaactcacataccgtgtccagttggagaaacgttcgaggggtgacttagaagaagcaaagactcaggagattttgaaacttaagagttcattcgaagaaatgcggaagaaagttgatgaaacaaatgcgttgcttctgaaggaacgtgaagctgcaaagaaagccgctgaagaagctcctcctgttatcaaagaaacacaaattttagttgaagataccaagaagattgaattgatgacggaggaactggagagtgtaaaggttactctagagaacgaaaaacaaagggctgatgatgcagtgaggaaattcgaagaagctcaagagtctctcgaagacaaaaagaaaaaactggaagagacagagaagaaaggtcagcaactccaagaatcactgacaaggatggaagaaaagtgcagcaacttggaatcagagaataaagtcctacggcagcaggctgtgtccatggcaccgaataaatttctctctggccgctcccggtccattttacagagaggttcagagagtggtcatcttgcagtggatgcgaggtcaaacttggatctgcatagccattcgattaaccatagagatccctcagaagtggaggataaaccacagaaatcattaaatgagaagcagcaagaaaatcaagacctacttatccgctccattgttcaacacttgggattccaggggaaccgacctatcacagcatgtatcatttacaaatgtttactgcaatggaggtcatttgaagttgaacgaaccagtgtctttgatcgcattattcagacaataggccatgctattgagactcaagataacaacaatacattggcctattggttatccaatacctcgacactcctattactcctccagcgcacactcaaagctagtggtgcagctgggatggctccgcagcgccgccgttcatcttctgccactctatttggaaggatgagtcagagcttccgcggggcacccccaggtgtaaatcttgccatgataaacggtgctgcgggaggtggagcagatacctttagacaagttgaagcaaaatatccggctctactgtttaagcagcagctcacagcttatgttgaaaagatatacggaatgattcgcgataacttgaagaaggagatttctccactccttggattgtgcattcaggcaccaagaacatcgagggctagtttagtgaaaggagcatctcgttccgttggcaacactgcagctcagcaggcactgatcgcccattggcaaggaattgtcaagagtcttacaaatttcctcaatactctaaaatcaaacaatgttccttcatttttggtgcgtaaggtgtttacgcagatattctcattcatcaatgttcagctgtttaacagccttttattgagacgcgagtgttgttcatttagtaatggggagtacgtcaaagcgggcttgtctgaattggaacactggtgttttaaggccacaaatgagtatgcgggttcttcgtgggatgagcttaagcatattagacaggccattgggtttctggttgtacatcaaaaaccaaagaaaactcttgatgagatcagtcatgatctttgcccggtactaagcatacaacagttatacagaatcagtaccatgtactgggacgacaaatacggcacccatagcgtctctccagacgtaatagcaaatatgagggtgctaatgacagaagattcgaacaatgctgttagcaactcattccttttggatgacgactcgagcatccctttctcggttgatgatttatcaaagtcgatggagaaatttgaaatagcggatatcgaaccgccacctttaatccgggagaattctggatttagcttcttattgccagtctctgagtgattcttttttgtctctacaatacacacacaccaacggaagccatatattctttttgaagtgttcctcacttattcttttaaatgttcatgacttattctttcgggttaatttactgaatgacc

SEQ ID NO: 6 - protein, 1538 aa, Arabidopsis thaliana
MVRECFTFLNIFVLHSIGSHVWFEDPEVAWIDGEVEKINGQEVVIQATTGKKVTAKLSKIYPKDVEAPAGGVDDMTKLSYLHEPGVLQNLKIRYELNEIYTYTGNILIAINPFQRLPHIYDAHMMQQYKGAPLGELSPHVFAVADVAYRAMINEGKSNSILVSGESGAGKTETTKMLMRYLAYLGGRAVTEGRTVEQQVLESNPVLEAFGNAKTVRNNNSSRFGKFVEIQFDKQGRISGAAIRTYLLERSRVCQISDPERNYHCFYLLCAAPQEEIEKYKLGHPKTFHYLNQSKCFELVGISDAHDYLATRRAMDIVGISEKEQEAIFRVVAAILHIGNIDFTKGKEVDSSVPKDEKSKFHLKTAAELLMCDLKALEDALCKRVMITPEEVIKRSLDPQSAVTSRDGLAKTVYSRLFDWLVDKINKSIGQDANSRSLIGVLDIYGFESFKTNSFEQFCINFTNEKLQQHFNQHVFKMEQEEYTKEAIDWSYIEFVDNQDVLDLIEKKPGGIVALLDEACMFPKSTHETFANKLYQTFKTHKRFIKPKLSRTDFAVAHYAGEVLYQSELFLDKNKDYVIPEHQDLLGASKCPFVVGLFPPLPEETSKSSKFSSIGSRFKLQLQQLMETLNCTEPHYIRCVKPNNLLKPAIFENVNIMQQLRCGGVLEAIRISCAGYPTRKPFFEFINRFGLLSPAALEGNFDEKVACQKILDNMGLKGYQIGKTKVFLRAGQMAELDARRAEVLSSAAKKIQRRIRTHQAQKRFIVLRKATISLQAICRGRLSCKHYDNLRREAAAVKIQKNGRRHYSRKSYKKLHVASLVVQTGLRAMAARKQFRFRKQTKAATIVQAQWRCHRAISYYKKLKNGVVLSQTRWRGRLAKRELRKLKMAARETGALKEAKDMLEKKVEELTYRVQLEKRSRGDLEEAKTQEILKLKSSFEEMRKKVDETNALLLKEREAAKKAAEEAPPVIKETQILVEDTKKIELMTEELESVKVTLENEKQRADDAVRKFEEAQESLEDKKKKLEETEKKGQQLQESLTRMEEKCSNLESENKVLRQQAVSMAPNKFLSGRSRSILQRGSESGHLAVDARSNLDLHSHSINHRDPSEVEDKPQKSLNEKQQENQDLLIRSIVQHLGFQGNRPITACIIYKCLLQWRSFEVERTSVFDRIIQTIGHAIETQDNNNTLAYWLSNTSTLLLLLQRTLKASGAAGMAPQRRRSSSATLFGRMSQSFRGAPPGVNLAMINGAAGGGADTFRQVEAKYPALLFKQQLTAYVEKIYGMIRDNLKKEISPLLGLCIQAPRTSRASLVKGASRSVGNTAAQQALIAHWQGIVKSLTNFLNTLKSNNVPSFLVRKVFTQIFSFINVQLFNSLLLRRECCSFSNGEYVKAGLSELEHWCFKATNEYAGSSWDELKHIRQAIGFLVVHQKPKKTLDEISHDLCPVLSIQQLYRISTMYWDDKYGTHSVSPDVIANMRVLMTEDSNNAVSNSFLLDDDSSIPFSVDDLSKSMEKFEIADIEPPPLIRENSGFSFLLPVSE

SEQ ID NO: 7 - DNA, 2062 bp, Arabidopsis thaliana
agcaccagacgactcgtcctccacgatcccaatttctccaatttcaattttgccaaagagcgagagagaaggaagaagatccagacgaagtggtttgccttcagggaacgagagagagaaagagattttaacaaacgatgtcgctgaggccgagcacacgcgcggagctaaggaagaagatatacaagacaggcgtcgatgccgatgaggccaggcggaggagagaggacaatctcgtcgagattaggaaaaacaagcgtgaggatagtcttctcaagaagcgtcgtgaaggaatgatgcttcagcagcagctgcctctcggagctggccttgatggtccccagaccgctgccgccgttgagaaacgattagaaggtatcccaatgatggtacaaggtgtttattctgatgatcctcaagctcagctagaagcgactacccaatttagaaagttgttatctatagagcgtagtcctccaattgatgaagtgatcaaagctggggttatccctcgatttgtggagtttcttggaaggcatgaccatcctcaattgcagtttgaggctgcatgggctttgaccaatgttgcgtcaggaacatcagatcatactcgggttgtaatcgaacagggggcggttcctatcttcgttaagcttcttacatctgctagtgatgacgttcgagagcaggcggtgtgggccttgggaaatgttgctggggactctccaaactgcaggaatcttgttctcaactatggggcccttgagccattgctggctcagttaaatgaaaattctaagttgtccatgctaagaaatgctacatggaccttgtccaacttttgtcgtggtaaaccaccaacaccatttgaacaggtgaagcctgcgttgccaattcttcggcagcttatctatctgaatgatgaagaggttctcactgatgcttgctgggctctctcctacctttcagatggccccaatgataagattcaggctgtgattgaggcaggtgtctgtccacgacttgtggagcttttgggtcatcaatcacctacggttctcattcctgctcttcgaactgttgggaacatcgtaactggtgatgactctcagacacagtttataattgagagtggcgtactaccacacctttataatttgctgacgcaaaatcacaagaaaagtataaaaaaagaagcttgttggactatctcgaatattactgctgggaataaacttcagatagaggctgtggttggcgctggaataatcctccctcttgtgcacttgctccaaaacgcggagttcgatataaagaaggaagctgcttgggctatttccaatgccacatcaggagggtcacatgagcagattcaatatttggtgacccaaggctgcatcaaaccactttgtgatcttctaatctgccctgatccaaggatcgtgacagtgtgcctcgagggtcttgaaaacattctcaaggttggtgaggctgacaaggaaatgggattaaacagtggggtgaatctctatgctcaaataatagaagaatctgatgggttggacaaagtcgaaaaccttcaatcccatgataacaacgagatatatgagaaggccgttaagatattggagagatattgggctgaagaagaggaagaacagattctgcaggacggcgggaatgacaattcacaacaggctttcaattttgggaacaatcccgctgctcccgttggtggattcaaatttgcctgaaaaaggttcaagttcgactttttgagttctggtgcaaaaaggcttatttttctgtttttttttctttttgttgttgatgttgtccttatttgtctgaatcattctctgattctgtatcttaaactctgctatgaattatgtgtagtgtggtttctggtttaggatatggtacactttgtatttgtcactttaatctttgtcgtcgttatagtttaataacttttacttggcaagagtacaagtacaagaaatatttgattgcaaaagagtcttcttgtcttgttaataaagtcctcaaatgaattggt

SEQ ID NO: 8 - protein, 538 aa, Arabidopsis thaliana
MSLRPSTRAELRKKIYKTGVDADEARRRREDNLVEIRKNKREDSLLKKRREGMMLQQQLPLGAGLDGPQTAAAVEKRLEGIPMMVQGVYSDDPQAQLEATTQFRKLLSIERSPPIDEVIKAGVIPRFVEFLGRHDHPQLQFEAAWALTNVASGTSDHTRVVIEQGAVPIFVKLLTSASDDVREQAVWALGNVAGDSPNCRNLVLNYGALEPLLAQLNENSKLSMLRNATWTLSNFCRGKPPTPFEQVKPALPILRQLIYLNDEEVLTDACWALSYLSDGPNDKIQAVIEAGVCPRLVELLGHQSPTVLIPALRTVGNIVTGDDSQTQFIIESGVLPHLYNLLTQNHKKSIKKEACWTISNITAGNKLQIEAVVGAGIILPLVHLLQNAEFDIKKEAAWAISNATSGGSHEQIQYLVTQGCIKPLCDLLICPDPRIVTVCLEGLENILKVGEADKEMGLNSGVNLYAQIIEESDGLDKVENLQSHDNNEIYEKAVKILERYWAEEEEEQILQDGGNDNSQQAFNFGNNPAAPVGGFKFA

SEQ ID NO: 9 - DNA, 1627 bp, Arabidopsis thaliana
ccgagattacagagaaccccgtcccgtgtttaaaccctccggcgacaaagctcagatagagaaccgctccacccttgtcgttcgctgcagccatgtacggcggagatgaagtgtcagctattgtggttgacttgggttcgcacacttgcaaggctggttacgccggtgaagatgctcccaaggccgttttcccttccgttattggggcagtagatggtgtagaggcaatggatgtggatgttgattctacaaagactaattcgaactctgaggattcgaagaccgagtctgaaaaggaaaagagcaaacgcaagctctatgtaggatctcaagccatgagctaccgcagagatcatatggaggttttgtcacctataaaagatggcatcgtttctgactgggatttggtggacaatatatgggaacatgctttcaagagttgtctgatgattgatcctacggagcatccaatgctgctagctgagcctcctttaaacactcaacagcagagagagaaggcggcagagctaatgtttgaaaagtacaaagttccggcactgtttatggctaagaaccctgttctcacgtcttttgctactgggcgtgctacttctttggttgttgactgcggtggaggatccacaaccatttcaccggtgcatgatggttatgttcttcagaaggctgttgtatcgtctccacttggaggggaatttctcactgactgcctactgaaaagcttggagagtaaaggaattaaaataagacctagatactctttcaagaggaaggaagtacgagcaggggaattccaggttgaagatgtggatattcctgacaccacggaaagctacaaactcttctgccagaggatgatagtgggtgatatcaaggattccatttgtcgagttcctgatactccctatgacgataaatcatattcaaacatccctactacgtcgtacgagcttcctgatggccagacgctcgagattggtgctgataggttcaaagttcctgatgtgatgttcaacccgtccatagtccagacgattcctggaatggagaagtatgctgagatgattccttccgttcgtgggttaccacacatggtcatggagagcatcaacaaatgtgatgtagacatccggagagagttgtatagtagcatactgcttgctggtggcacatcgtcaatgcaacagctgaaagaacgtctcgaaaaggacttgatcgaagagtctcctcactcagctagagttaaagtgttggcaagcggtaacacaacagaaagaagattcagtgtatggataggagggagtatattggcatcactaggctcatttcaacagatgtggttctccaagtctgagtatgaggaacatggagcttcctacattcagagaaaatgcccttaaagcaggcagtttcagattatgtggagtctgacaagacgaaacttggaaactaatgtgttattttcattgtgcatcgttgttccttgaagattattagtattccgcctgaaccttttagaatgagtgtcattaacaagcattatagtgctattttaaaaacataaaaacatgtggaagaagtttcgttgctttattagattttcgcacaa

SEQ ID NO: 10 - protein, 441 aa, Arabidopsis thaliana
MYGGDEVSAIVVDLGSHTCKAGYAGEDAPKAVFPSVIGAVDGVEAMDVDVDSTKTNSNSEDSKTESEKEKSKRKLYVGSQAMSYRRDHMEVLSPIKDGIVSDWDLVDNIWEHAFKSCLMIDPTEHPMLLAEPPLNTQQQREKAAELMFEKYKVPALFMAKNPVLTSFATGRATSLVVDCGGGSTTISPVHDGYVLQKAVVSSPLGGEFLTDCLLKSLESKGIKIRPRYSFKRKEVRAGEFQVEDVDIPDTTESYKLFCQRMIVGDIKDSICRVPDTPYDDKSYSNIPTTSYELPDGQTLEIGADRFKVPDVMFNPSIVQTIPGMEKYAEMIPSVRGLPHMVMESINKCDVDIRRELYSSILLAGGTSSMQQLKERLEKDLIEESPHSARVKVLASGNTTERRFSVWIGGSILASLGSFQQMWFSKSEYEEHGASYIQRKCP

SEQ ID NO: 11 - DNA, 2394 bp, Arabidopsis thaliana
aggaggagaaagagaaagggggaagagaggagagagagagagagaaagagattagagagagaaagaagagaagaggagagagaaaaaaatgggtgaggtagcagatacaatgacgaagaagaagaagaaaggaaggccatctctattagaccttcaaaaacgagctatcaaacaacaacaacaacaattacaacagcaacaacaacaacacaagaacaaccatcaagacgacgatgaccaccaccacaacaacaacaatagatccggctcgaaaaaccctaattctctcaatcaccgatccaaacgccggaaccctaattcaaacgacggcgattccccttggatcaaagacgaaggtgaagacaacgacgatgacgagcggcgagagaagaaacataagcttttacatggattgaactctcactctcatcgacattctcctaattctcaatccgatctgaatctcgaccaaactccagaaccgtcctttaatagacgcaacctctccgccgccgcctccggatctgattatcatacgggagaaaaggcttcgaaagcgacagacattcttcaagggtctcccgtggagtctggtcccactactcctttgccagacaaaaagttgttactcttcatcctcgatagacttcaaaagaaggatacttatggagtttactctgacccggttgatcctgaggagcttcctgattattttgagattattaagaatccaatggattttagcacattgcggaacaaattagactctggagcatattccactttagaacaatttgagagagatgtgtttttaatatgtacaaatgcaatggaatacaattcagcagacactgtatattatcgacaggcacgggctatacaagagttggcaaaaaaggattttgagaatttaaggcaagacagtgatgatgaagaaccacaaagccaacaacagcaacagcagcaaccaaaagttgcaagaagaggccgtccgccaaagaaacatcctgaaccatcttctattgaccgcactgcttctgaaatttcagctgatgctctcattcctggagatagctctaacaagttttctggtgcttacaatttaagaaaggctcctccttcatacaaattccgccaagcagaatcatcagttagaatcaatcataacagtgaaacccagagtggttggtcggtagactgggagagcgaatttccatcttcggttgtgaaggcggttaacaagtatgggatgaaacatttcaatgtcgatgataacagacgcgatacctacaaccacctctcgacttctacccaagaaccatcggttttgacaacgcttgaagacgagttaaaacagttgattccagttgggctgaacatggagtacggttacgcgaagagtctagcacgatatgctgcaaatcttggtcctgttgcctggaaaattgcatcgaggagaatcgagactgtattgccctctggaatcaaatttggtcaaggttgggttggagagaacccagcaggacctgaagaggatgattctcagaaacaaaacatattaatgtcgtcgggaaaacaaaagtgttctaatgacttagcgtctgatgatcattctaacagaatcctgtctccaaccgcttcagtttcaagtgctttcataggaaacagacatgcttcctctcaagccatcgaagagaccacaccaccacctgctcgtgtcttgaatccagaaatcgatcacccatcctcctcctctcaccaagcaggactgctaatcaaaacagagagcagcaacggcctcatccgcggattcaaccataatgcaaatcagatgctcggaattgctagacagcaacaaccaaacgtaagcaacgaggccacaccggtctcgcaacaacaaggctcattgtttccttaccccaaacaagaattccaccggtttccgccagaccttaacgctaggctagtctcaccaaactccccgggctctaatcagcagactggttcgtcctcgtcgcagcatccggatctggcattacagctgtgaagatgagtattggatatttgaaagaggaagaagaggcattttccattggctatctcagccaaggattttctggaatgaaatcttgtggaaagtcaaggcttatttgttgtgacatgaaaatatatgggacaagtctctctctatttgtacagattgttgcaacttccataatttttttaggggtaaaaagagaaaacaagagggaaaagaaaaaccacaggagtcacgcaggctgtagaatatatagtttatatttttttctcatttttctagaaattttcagatatattttcgtatgtcctaatcttggccataaaacaaagtaatgttaggtttgtgtccttggc

SEQ ID NO: 12 - protein, 652 aa, Arabidopsis thaliana
MGEVADTMTKKKKKGRPSLLDLQKRAIKQQQQQLQQQQQQHKNNHQDDDDHHHNNNNRSGSKNPNSLNHRSKRRNPNSNDGDSPWIKDEGEDNDDDERREKKHKLLHGLNSHSHRHSPNSQSDLNLDQTPEPSFNRRNLSAAASGSDYHTGEKASKATDILQGSPVESGPTTPLPDKKLLLFILDRLQKKDTYGVYSDPVDPEELPDYFEIIKNPMDFSTLRNKLDSGAYSTLEQFERDVFLICTNAMEYNSADTVYYRQARAIQELAKKDFENLRQDSDDEEPQSQQQQQQQPKVARRGRPPKKHPEPSSIDRTASEISADALIPGDSSNKFSGAYNLRKAPPSYKFRQAESSVRINHNSETQSGWSVDWESEFPSSVVKAVNKYGMKHFNVDDNRRDTYNHLSTSTQEPSVLTTLEDELKQLIPVGLNMEYGYAKSLARYAANLGPVAWKIASRRIETVLPSGIKFGQGWVGENPAGPEEDDSQKQNILMSSGKQKCSNDLASDDHSNRILSPTASVSSAFIGNRHASSQAIEETTPPPARVLNPEIDHPSSSSHQAGLLIKTESSNGLIRGFNHNANQMLGIARQQQPNVSNEATPVSQQQGSLFPYPKQEFHRFPPDLNARLVSPNSPGSNQQTGSSSSQHPDLALQL

SEQ ID NO: 13 - DNA, 2737 bp, Arabidopsis thaliana
aaagaaattgcgagaaaaaggtttggtgtttagctcgagagctggaaatcagaacgactcggaggagagaagacaaagaaagcaattctttttactaagggtcttgcttcgattccacagaacccaaaacctctatttctctatcttcatccacaaaaatgccagcttctgaagatagaagagggaaatggaaaaggaagaagagaggggggttatcggcggcgaggaaaccgaaacaagaggaggaagatatggaggaagaagacgaagagaataacaacaacaacaacgaagaaatggatgacgttgaaaatgccgatgagcttcagcaaaacggcggcgcaactcccgatccgggacttggtattggcgaggtagttgaagattctggttcgcgcatctctgatttcccggcagtggttaagcgtgttgtgatccggccacacgcgtctgtaatggctgttgtggcggctgagagagctggtttgataggggagactagagggcaaggttcacttccagctctggagaacatttcgtttgggcaattgcaagcgttatctactgtacctgctgattctcttgatcttgagaggagtgatggatcgtcttcggcttatgttatctctccaccacctattatggatggagaaggagttgttaaacggtttggggatctggttcatgtcttgcctatgcattcagattggtttgcaccaaacacagtagatcgacttgaaaggcaagtggtgccacagtttttctctgggaaatcgccaaatcatacacccgaaagttatatggaattcaggaacgccattgtttccaaatatgtagagaaccctgaaaagacactgacgatttctgattgccaaggattggtagatggtgttgacattgaagattttgcacgagttttccgttttcttgatcactggggaataatcaattactgtgccactgcccagtcacatcctggccctttgagagatgtatcggatgtgagggaggacacaaatggcgaggtcaatgtgccgtctgctgctttaacatctattgatagtttgatcaaatttgacaagcccaactgtagacacaaggggggtgaagtctattcatccttgccaagtttggatggtgacagccctgacttggacatcagaattcgtgaacacctatgtgatagtcattgcaaccattgttctcgaccgcttccaactgtgtacttccaatcgcaaaagaagggggatatactcttatgctgtgattgttttcaccatggaagatttgttgttggacattcttgtcttgactttgtaagagtggatccaatgaaattttatggcgatcaagatggagacaattggactgatcaggaaactctcttgcttcttgaagctgtggaactctacaatgaaaattgggttcaaattgctgatcatgttggttccaagtcaaaagctcaatgcattcttcattttcttcgattacctgtggaggatggtctattagataatgttgaggtttctggtgtaactaatacggaaaaccctacaaatggatatgaccacaaaggaacagattcaaatggggatttacctggatattccgagcaaggttctgacactgagatcaagcttccatttgtgaagtctccgaatccggttatggcattggttgcatttttggcatcagctgttggacctcgagttgctgcgtcctgtgcccatgaatccctctcggttttatctgaggacgataggatgaaatctgagggaatgcaagggaaagaagccagcttgcttgatggagaaaatcaacagcaagatggagcacacaaaacatcaagccaaaacggagcagaagcgcagactccactgccacaggataaggttatggcagcatttagagccggtctatcagctgcagcaacaaaagcaaaattgtttgctgatcatgaggaacgcgaaatccagagactttctgctaatatcgttaatcaccagctgaagaggatggagctgaaattaaagcagttcgcagaaattgaaacactgttgatgaaagaatgcgaacaagtagagaaaacccgtcagagattttctgcagaacgggctcgtatgctctcagcaagatttggatctcctggaggaatctctccacagactaataatctccaaggcatgtctctatccacaggtggtaacaacatcaattctctcatgcatcagcaacatcagcaacaacaagcttccgcaacttctcaaccaagcataatcccaggattcagcaacaacccgcaagttcaagcacagatgcatttcatggcacgacaacaacaacaacaacaacaacaacaacaacaacaacagcaagctttctcgtttggcccgagattacctctcaatgcaatacagaccaatgcaggatcaacagcttcaccaaacgtcatgtttggcaacaaccaactaaataaccctgcagcagctggagcagcatcgatcaaccagccttcgtttagtcacccgatggttaggtcttccacaggttcaggctcagggtccggcttaggcttaaactaagatccatctttctctagcttatttagcttatcagtatccatatttatttcaccttgttatttttaaagataagttatttggctttgagaccgtagtcttgttccaagttagtgtcttgtagtatcaaaccatcatcatcatcattgtgaattaaa

SEQ ID NO: 14 - protein, 807 aa, Arabidopsis thaliana
MPASEDRRGKWKRKKRGGLSAARKPKQEEEDMEEEDEENNNNNNEEMDDVENADELQQNGGATPDPGLGIGEVVEDSGSRISDFPAVVKRVVIRPHASVMAVVAAERAGLIGETRGQGSLPALENISFGQLQALSTVPADSLDLERSDGSSSAYVISPPPIMDGEGVVKRFGDLVHVLPMHSDWFAPNTVDRLERQVVPQFFSGKSPNHTPESYMEFRNAIVSKYVENPEKTLTISDCQGLVDGVDIEDFARVFRFLDHWGIINYCATAQSHPGPLRDVSDVREDTNGEVNVPSAALTSIDSLIKFDKPNCRHKGGEVYSSLPSLDGDSPDLDIRIREHLCDSHCNHCSRPLPTVYFQSQKKGDILLCCDCFHHGRFVVGHSCLDFVRVDPMKFYGDQDGDNWTDQETLLLLEAVELYNENWVQIADHVGSKSKAQCILHFLRLPVEDGLLDNVEVSGVTNTENPTNGYDHKGTDSNGDLPGYSEQGSDTEIKLPFVKSPNPVMALVAFLASAVGPRVAASCAHESLSVLSEDDRMKSEGMQGKEASLLDGENQQQDGAHKTSSQNGAEAQTPLPQDKVMAAFRAGLSAAATKAKLFADHEEREIQRLSANIVNHQLKRMELKLKQFAEIETLLMKECEQVEKTRQRFSAERARMLSARFGSPGGISPQTNNLQGMSLSTGGNNINSLMHQQHQQQQASATSQPSIIPGFSNNPQVQAQMHFMARQQQQQQQQQQQQQQAFSFGPRLPLNAIQTNAGSTASPNVMFGNNQLNNPAAAGAASINQPSFSHPMVRSSTGSGSGSGLGLN

SEQ ID NO: 15 - DNA, 3231 bp, Arabidopsis thaliana
aattatggtttacgaagactgagaagaaaaaaacgagcatcgtccatcgagatccaaatcctcagtttcattttcatctctctctctcgtattgatcagctactcgaaactccggtaacggattttcacaatcccggcggcgaaactcttcttcccggctaagttttcattttcttcagattcctcgtaaagttgccggtggaccaaggtccaactcttgaacaccccaaatcatgaatcccttttcttctggtactcgtttaagggacatgatccgtgccataagagcatgcaaaacagctgcggaggagcgagctgttgtaagaaaggagtgtgccgatattcgagcattgattaatgaagatgacccgcatgatcggcaccggaaccttgcgaaactcatgtttatacacatgctgggttatcccacacactttgggcagatggagtgcttgaagctaattgcatctcctggatttccagagaagaggattggatatctagggctaatgttgcttcttgatgagagacaagaagtgttgatgcttgtcacaaattcgttaaaacaagatcttaatcactcgaaccagtatgttgtaggacttgctctctgtgctttagggaatatttgttcagcagaaatggcccgtgatcttgcgccagaagtagaaagattaatccagtttcgtgaccctaatatccgaaagaaggcggcgctttgctctactagaataataaggaaagttccagatctagcagaaaacttcgtaaatgctgctgcttccttgcttaaagaaaagcatcatggggttcttataacaggagttcaactttgttatgaattatgcacgattaatgatgaagccctagagtacttcagaacgaaatgcacagagggactgataaaaactttgagggatattactaatagcgcatatcagcctgagtatgatgttgcagggatcacagacccttttctccacatacggttgctcaggctcttgcgtgttttaggccagggtgatgctgatgctagtgatttgatgacagatatacttgcacaggtggcaacaaaaactgaatcaaacaaaaacgcagggaatgcggtactctatgagtgtgttgaaacaatcatggccattgaagacaccaatagcttgcgtgtgcttgctatcaatatcttgggaagattcttatctaaccgcgacaataacatcagatatgttgcattaaacatgctgatgaaagctatcactttcgatgatcaagcagtgcaaaggcacagagttacaattttggaatgtgtgaaggacccagatgcttctatccggaaaagagctcttgagcttgtcactcttttggtgaatgaaaacaatgtcacacaactgacaaaggagctaattgattatttggaaatcagcgacgaagattttaaggaagatcttagtgcaaaaatttgttttatcgttgaaaagttttctccagaaaaactatggtacattgatcagatgctcaaggttctgtgtgaggctggaaagtttgtgaaagatgatgtgtggcatgcacttattgttgtcataagcaatgcatcagagcttcatggatatacagttagggccttgtacaaatcagtcttgacttattcggaacaggagacccttgtccgagtggcggtatggtgcattggggaatatggtgatctgttggttaacaatgtggggatgcttggtattgaagatccaataacggtaacggaatctgatgcagtggacgttatcgaggatgccattactcgccataactcagattcgactacaaaagcaatggcattggttgctctactgaagttgtcatcccgctttccttctatttcagagagaattaaagacataattgtgaagcagaaaggaagccttctccttgaaatgcagcagagagctattgaatacaattctatagttgacaggcataaaaatatcaggtcttctctggttgacagaatgccggtactggatgaggctactttcaatgtgaggagggccggctcttttcctgcatcagtttcaaccatggccaagccttcagttagccttcaaaatggtgttgagaaacttcctgtcgctcctcttgtggacttgctagacctagattctgacgatatcatggctgcacctagtccatctggtacagatttccttcaggatcttctcggtgtagacttaggttcatcgtcagcacaatatggtgcaacccaggctccaaaagctggcacagatctgttgctggatattctatcaattggaacaccttctcctgcacaaaacagcacatcatctattggtttattatcaatagctgacgttaacaataatccctcaattgcgctagacacactttcttcaccagctccacctcacgtagcaacaacttcgtccaccggtatgtttgatttgctagatggtctttctccaagcccatcgaaggaagccaccaatggtccagcttatgcacctattgttgcatacgagagcagctccttgaagattgagttcaccttctcaaagacaccagggaatctgcaaacgacaaatgtccaggctacttttactaatttatctcccaatactttcacagattttatattccaggctgctgttccaaagttcctccagctgcacttggatccagctagcagtaacacactcctggcaagcggtagtggtgccatcacgcagaatctaagagtcactaacagccagcaggggaagaaatctcttgtgatgcgcatgaggattgggtacaaactgaacggaaaagatgtattagaggaaggacaagtcagcaacttccctcgcgggttgtgaaactcatcgatcagccattgtattttcagcataaggacttgagtgtttctttctatcaaacccaactaaaaaagaaagacaagtcttgcccaagccgttgatgcagctttctccttccaattttttcatccgttttatgaaacaagtagtactttggcctttgcttgtgatttgaggttcttgggttttctttttgtacaaaagttttgatgtttggaatcggaaagtggtcaagaagtagaatttgtctctcatgtctctgagactataaaaaagatgtgatttatgacccataaccataactcatgatgtatctactacagttacaattttcgtcttgcaaagaaggagtattggattttggatc

SEQ ID NO: 16 - protein, 876 aa, Arabidopsis thaliana
MNPFSSGTRLRDMIRAIRACKTAAEERAVVRKECADIRALINEDDPHDRHRNLAKLMFIHMLGYPTHFGQMECLKLIASPGFPEKRIGYLGLMLLLDERQEVLMLVTNSLKQDLNHSNQYVVGLALCALGNICSAEMARDLAPEVERLIQFRDPNIRKKAALCSTRIIRKVPDLAENFVNAAASLLKEKHHGVLITGVQLCYELCTINDEALEYFRTKCTEGLIKTLRDITNSAYQPEYDVAGITDPFLHIRLLRLLRVLGQGDADASDLMTDILAQVATKTESNKNAGNAVLYECVETIMAIEDTNSLRVLAINILGRFLSNRDNNIRYVALNMLMKAITFDDQAVQRHRVTILECVKDPDASIRKRALELVTLLVNENNVTQLTKELIDYLEISDEDFKEDLSAKICFIVEKFSPEKLWYIDQMLKVLCEAGKFVKDDVWHALIVVISNASELHGYTVRALYKSVLTYSEQETLVRVAVWCIGEYGDLLVNNVGMLGIEDPITVTESDAVDVIEDAITRHNSDSTTKAMALVALLKLSSRFPSISERIKDIIVKQKGSLLLEMQQRAIEYNSIVDRHKNIRSSLVDRMPVLDEATFNVRRAGSFPASVSTMAKPSVSLQNGVEKLPVAPLVDLLDLDSDDIMAAPSPSGTDFLQDLLGVDLGSSSAQYGATQAPKAGTDLLLDILSIGTPSPAQNSTSSIGLLSIADVNNNPSIALDTLSSPAPPHVATTSSTGMFDLLDGLSPSPSKEATNGPAYAPIVAYESSSLKIEFTFSKTPGNLQTTNVQATFTNLSPNTFTDFIFQAAVPKFLQLHLDPASSNTLLASGSGAITQNLRVTNSQQGKKSLVMRMRIGYKLNGKDVLEEGQVSNFPRGL

SEQ ID NO: 17 - DNA, 838 bp, Arabidopsis thaliana
agatcattatcttagaaatatccttttatctcattctggaaacttcttaccataacagaaaataaacaaatctcattccggaaaacgctcataaattgtccgaaagccctaaaaatctgagtctcgcattaagtccaaacactttcatttgtctcctttcgtcaactccacagagatctcctcatggctccaattgctgtcggcgatgtcgtaccagacggaactatctccttcttcgatgagaatgatcaacttcagaccgcctccgttcactctctcgccgccggtaaaaaagtcattctctttggtgttcctggtgctttcactcccacttgcagcatgaagcatgttcctgggttcattgagaaagcagaggagctgaagtcaaagggtgttgatgagatcatttgctttagcgtgaacgatccgtttgtgatgaaagcatggggaaaaacatacccagagaacaaacatgtgaagtttgtagctgatggggtcttggtgttaggtcaaggagatttgctctgttacttgatgatctcaaagtgactgtagccaatgtcgaatctggtggcgaattcacagtttccagcgccgatgatatcctcaaggctctctaagaaatgtaccacttgtgttgtctatgtaaaccgctgtatgtgtagtagaggattctatagcttgttctcagacattaaccaaggttgtaataaagcggtttcattgtgacttgtttggcataacaaagtatttggttttgttgtttttctgtgcgttgattaatgaaagatgtgactcattgacgtgaacatttatgccaaattttgccattgttgtt

SEQ ID NO: 18 - protein, 121 aa, Arabidopsis thaliana
MAPIAVGDVVPDGTISFFDENDQLQTASVHSLAAGKKVILFGVPGAFTPTCSMKHVPGFIEKAEELKSKGVDEIICFSVNDPFVMKAWGKTYPENKHVKFVADGVLVLGQGDLLCYLMISK

SEQ ID NO: 19 - DNA, 1496 bp, Arabidopsis thaliana
gcttttgactcacttttttaatctttttggattttggtgaaaaagtttaatttgtctctttctctatttatctccggcgtcaatttcacggcggctacacgacggttatcgatgtcattgactgtaccggagttcgatttcagattgacgccacagtttggtttctcacagtcaccgatcggggagcgtaatttcgcggatgttgataatctggagaactgtattaagtatttgaatcagagcttagtcacctctggattctctgcttcgcttgacctcttcgctaccgatcctgtttcgattgctagaacttgcaattgcgtatacgctttgattcaacagaggcaacgagatgtggaatttagagaatctgctaatgatcagagacaacgacttttatccgatatggcgagactcgaagcaaaagttgaaaggcttgagactcaattgcaagctaaagaaagggaacttggttcggtgacaagaacggaagcaaaaaatacagcggctttaaagacgcagaatgagaagcttcaaaaagagagagatgagtttcaacgaatggtgattgctaaccagcaagtcaagacccaacaattacatgaaacaaaaaagaaagaaaaagagtacataaagttacaggagaggttaaaccaagtgttgatggagaaaaagaaggaaacgagatcaggcatggagattatgaatctactccagaaagaagggagacagcgtggaacatggagtgggaagaaaactgactctgatttctacaaaaaaattgtggatgcatatgaggcgaaaaatcaagaactgatggcagagaacactgatctgagagcgttactacgatcaacgcagggtgacatgcgttctttcttgaatgcttctggtggattaaccaaccaatctttggtagctaatggaagacacggtgcagacccttctcagtctcctttgggcgggaagacggacgtttttgacctaccttttcgtatggcacgaggtcaaatagaagatagtttacgctctaagatggtttccatcaaggaacgtatgggtcagttagtagatgcacaaaaagaagtatccattacttcagaagcgtcagagagggaacttgaacttgaagcacaactcgtcgaggcacgcagcattattcaagaacaggaatctataatgtccaaacatttacctaagacagatcggagaaggaactcagctcctccacattcttctgtcaacggactgcgtggctgactaattagattgtgaatctcaggttcaaaatatcaaatctcttcctgtaatttgatcttgctaaacaaagaaatgttttatgaacttataaaaaaatttaaatgaatgtggattcgtatttgtaacgttgtacagaacacttgcagacagcaagctgcaagctgtagagtattatagatggagagatatgttttatatcataatatagatgcctttctttataaaagaaatcgaat

SEQ ID NO: 20 - protein, 284 aa, Arabidopsis thaliana
MARLEAKVERLETQLQAKERELGSVTRTEAKNTAALKTQNEKLQKERDEFQRMVIANQQVKTQQLHETKKKEKEYIKLQERLNQVLMEKKKETRSGMEIMNLLQKEGRQRGTWSGKKTDSDFYKKIVDAYEAKNQELMAENTDLRALLRSTQGDMRSFLNASGGLTNQSLVANGRHGADPSQSPLGGKTDVFDLPFRMARGQIEDSLRSKMVSIKERMGQLVDAQKEVSITSEASERELELEAQLVEARSIIQEQESIMSKHLPKTDRRRNSAPPHSSVNGLRG

SEQ ID NO: 21 - DNA, 10972 bp, Arabidopsis thaliana
cttcttcacttgtcagctctcaacgtttctcacctgaaatttcacttctgcttcgtcttctcgagccggatctctaatttggaattcttatgtgatggtgtaatttaagttaagatgacgtcttcttcgcataatattgagttggaagcagctaagtttctgcataaacttattcaagattctaaagatgaacctgcaaagctagcaactaaactttatgtgatattgcagcacatgaaaaccagtggaaaggaaaacacaatgccctatcaagtcatatctagggccatggacactgtagtcaatcaacacggtcttgacattgaagctttgaagtcctcgtgtcttcctcatcctggtggtacccaaacggaagattctgggtctgcacatttggctgggtcttcccaagcggttggagttagcaatgagggtaaagcaactctagttgaaaatgagatgacaaaatacgatgcattcacttctggtaggcagcttggtggatcaaacagtgcgtcacaaaccttttaccaagggtctggaactcaaagtaacagatcatttgatcgtgagagtccatccaacttggattctacgtctggaatttctcaacctcacaatcgtagtgagacaatgaatcaaagagatgtcaagtcgagtggaaagagaaagagaggtgaatcatcactttcatgggaccagaatatggataactctcaaatatttgatagccacaagattgatgatcaaactggagaagtaagcaaaatagaaatgcccggtaattcaggtgacattaggaatttgcatgttgggttgtcctcagatgcattcacgactccacagtgtggctggcagagcagtgaagccacagcaatcaggcctgcaattcataaagaacctggaaataatgttgcaggagagggattcctgccttcaggttcaccttttagagagcaacaactgaagcagctcagagcccagtgccttgtgtttctagctcttagaaatggtttggtaccgaagaaacttcacgtagagattgcccttcgaaatactttccgcgaagaagatggtttccgcggagaattgtttgatccgaaagggagaacacatacgtccagtgatctgggtggcattcctgacgtctctgcactgttgtcaagaacagacaatcccactggaagattggatgaaatggacttctcatccaaagaaactgagagatcaagactaggggaaaaaagtttcgcaaatactgtattttctgacgggcaaaagcttctagcatctagaattcccagctctcaagcacaaactcaggttgctgttagtcattctcaactaacgttttctcctggtttgaccaaaaacacaccatcagagatggtggggtggactggagtaatcaaaactaatgacctctcaacttctgctgttcaactcgacgaatttcattcttctgatgaagaggaaggtaatttgcaaccgtcgcctaagtacaccatgtcacagaaatggattatgggtcgacagaataagagactattggttgatcgtagttggtcccttaaacagcagaaagccgaccaggcaattggttcacggttcaatgagttgaaggaatctgtgagtttgtctgatgatatatctgcaaagaccaagagtgtaatagaactgaaaaagcttcagctgttaaatctacaacggcgattgaggagtgagttcgtttacaacttcttcaaacctattgcaactgatgttgagcatctaaagtcatataagaaacataagcatggccggagaattaagcagcttgaaaagtatgagcagaagatgaaggaagagagacaacgaagaattcgggagagacagaaggagttctttggagggttagaagttcacaaggaaaaactagaggatttgtttaaagttaggagagaaaggttgaagggtttcaatagatatgcaaaggagttccacaaaagaaaggaacgacttcaccgtgagaagattgacaaaattcaacgtgagaagattaatttgttaaagataaatgatgtggagggttatctccgaatggtgcaggatgccaagtcagatcgagtaaagcaactactcaaagagactgaaaagtaccttcagaaacttggatccaagttaaaagaggctaaattgttgaccagtcgatttgagaatgaggcagatgaaacgcgtacgtcaaatgctaccgacgatgaaactttgattgaaaatgaagatgagagcgaccaagcaaagcattacctggaaagcaacgaaaaatactacttgatggctcacagtataaaagaaaatattaacgagcagccatcgtccctagtgggtggaaagttaagagagtaccaaatgaacggcttaaggtggctagtttcactgtacaacaatcacttaaatggcattttagctgatgagatgggtctcgggaaaactgttcaggttatttctttgatttgctatctgatggagacaaaaaatgatagaggtcccttcttggttgttgtcccatcttcggttctgcctggttggcagtcagaaattaacttctgggccccatcaattcataaaattgtttactgtgggactcctgacgaaaggcgcaaactattcaaggagcaaattgttcatcagaagttcaatgtccttctgacgacatatgagtatctaatgaacaagcatgataggcctaaattaagcaagattcactggcactatattattattgacgaaggacatcgcataaagaatgcatcctgcaagttaaatgcagacctgaaacattatgttagctcccaccgacttctgttaactgggaccccattgcagaacaacctagaagaattgtgggcactgcttaatttcctgctgcctaatatattcaactcgtcagaagacttttcacagtggttcaacaaaccattccaaagtaatggagaaagttctgccgaggaggcattgctatcagaagaggagaatctactgatcatcaatcgacttcaccaagttcttcgaccatttgttctgcgtcggctgaaacataaggttgaaaatgagcttcccgaaaagatagagagattgatacgctgtgaggcttctgcttatcagaagctgttgatgaagagggttgaggataatttgggttcgattggaaatgcgaagtctcgtgcagtgcacaactcagtaatggagcttcggaatatttgcaatcatccatatcttagccaactgcattcagaggaggtcaataacataattcctaagcatttcctgcctccaattgtaagactgtgtggaaagcttgagatgttggatcggatgttgcctaaactcaaagcaacagaccatcgggttcttttcttttccacaatgacaaggcttcttgatgtaatggaggattacctcaccttaaaggggtacaaataccttaggctggacgggcagacatctgggggtgatcgtggtgctcttattgatggtttcaacaagtcgggttccccatttttcatatttctgttgagcattcgggctggtggagtaggagttaatcttcaagctgctgatactgtgatactattcgacactgactggaatcctcaggttgatctgcaagctcaagctagggctcacaggattggccagaaaaaagatgtgcttgttcttcgttttgaaacggtgaattctgttgaggagcaagtcagagcttcagctgagcacaaacttggagttgctaaccagagtataaccgctggcttttttgacaataacacgagtgctgaagatcgtaaggaatatttggaatcccttttgcgtgaatcaaagaaagaggaggatgctccagtattggacgatgatgccttaaatgatcttatagctcgaagggagtcagagattgatatctttgagtccatcgacaaacaaaggaaagaaaatgagatggaaacatggaataccttggtacatgggccagggtcagatagttttgcccacataccatctataccctctcggcttgttactgaagatgatttaaaactactatatgaaacaatgaaactaaatgatgtccccatggttgcaaaagaatcaactgttggcatgaagcggaaggatggttcgatgggaggcctagatactcaccaatatggaagagggaaacgagcaagagaggttcgatcttatgaagagaaattaactgaggaggagtttgagaagctgtgtcagactgagtcacctgattcaccccaaggcaagggcgaaggaagtgaaaggagcttggcgaatgatacatcaaatattccggttgaaaattctagtgacacactactccctacatctccgacacaggcaattactgtacaaccaatggaacctgtaaggccacagtcacatacactgaaagaagaaacacaacctataaaacgtggtcgtggtaggccaaagagaactgataaagccttgactccggtatcattatcagctgtaagcaggacacaggcgacagggaatgctatatcatcggcagcaactggtcttgattttgttagttcagataaaaggctagaagccgcttctcatcctacttcgtctcttgccctgacttcgcctgatttatctggtcctcctggttttcaatcattgccagcatctcctgctcctacgccaataagaggccgaggtaggggaagaagcagggggcgtggagcaggaaggggaagaagagttgaaggtgtattgcatggttccaacagttctattactcagagaactgaaaccgctacatctcttgcaagtgatgcagaagccacaaaatttgctcttcctcgttctgcatctgagattgtttcaagagtccctaaagctaatgaaggaagtacttcgaatcctgaccaagtatctcccgtgcattctgccactactgcactccgatcagacaaagcagcagataaggacctagatgcaccacctggttttgattcgggatcccatgttcagacgctaaatgtacttgaaaattcatcggaaagaaaagcatttgctgtaaagaagaggcctttgatccaaggtgtgagctcccagcatccagggcctaataaacagccacttgacttgccagtctccactagctccactttgttgggtggtggcccagtgcaaaatcagaatgccgtctcttctgtttgtgatggatccaaaagtccttctgagggtcgaacatatacagctttgcaaggtgtgacaactgcaccttctgatgctactctgccaatgagttctcaaccttctgatgctactctgccaatgagttctcaacctgtcggttctacggttgaagctcaagaagccaatgttccttctcttccagcagccttgcctgctaagaggcgagtccgcaatttgccaagcagaggagaaactcctaaacgccaaggaaagaggcgtggccaacctttacctgcaaccgatgcctcttctgcaaggagtacaggattaacaccacaaatagaggtcaaggttggtaatttatcaggcaccaaagctaagtttgatgctgttgccaaagaacaaccccacttcagccagtcagttgcacccgatattcactcttctggtagtttgagtcaggaaattagaagagacacctctggtactggtggttctgctaggaaacaaactgctgatgtaactgatgttgctcgagtcatgaaagagatcttttcagagacttccctattaaaacataaagttggagagccttctgcaacaacgagaacaaatgtgcctgacgcacaatcccctggtgagatgaatttgcacacagttgagacccacaaggcagaggattcttctggtcttaagaatcaagaagctttatataacctgagcaaggcagataaactggtatcagatattcctcatcctgttcctggtgatctgacaacttcaggatcagttgcaaacaaagatgttgacattgggtcgtctaaggttgctgctgaaaatgagcttgtcaaaattccgggtggtgacgtagattcttctgtaatacaactctctttgggaaatactttgactgctaaatcgtctttggaaaagtgcactgcagatcagcttctgggagaaaaactgtctcaagaaggtgaaaccacacctgctagtgatggtgaaacatgtcacctggcagaagaaacggcatcttcattgagttatgttcgatctgagcctactgcatctgcgtcgacaactgcggaacctctacctactgacaagttggaaaaaaatatttcttttcaagatgaagttaaaactctcaatggtgataaaagagaagctatcctcctaagttcggaagagcaaacgaatgttaactccaagattgagacaaattctgaggaacttcaagccagtagaacagatgaagttccacatgtggatggaaaatctgttgatgttgcaaatcagacggtgaaagaagatgaggcaaaacattctgttgaaattcaatcgtctatgctggagcctgatgaactgccaaatgctggacaaaagggtcacagtagcattgacttgcagccattggttttagttacaagcaatgagaatgctatgtcccttgacgataaagattatgatcctatctctaaatctgctgatatagaacaagatcctgaagaatctgtttttgttcaaggtgttggtaggcctaaagttggtactgctgatacacagatggaggataccaatgatgccaaacttctagtgggttgttcagttgagagtgaggaaaaagagaaaactcttcaatccctcatacccggtgatgatgctgatacagaacaagatcctgaagaatctgtttcggatcaaaggcctaaagttggttctgcttacacacagatggaggatacggatgaggcgaaacttctaatgggttgttcagttgagagtgaggaaaaagagaaaactcttcaatcccatatacccggtgatgatgctgatacagaaaaaaatcctgaagaatctgtttccgttcaaggtgttgataggccgaaagttggtactactgacacacagatggaggataccaatgatgccaaacttctagtgggttgttcagttgcgagtgaggagaaagagaaaactcttcaatcccatatacccggtgatgatgctgatacagaacaaaatcctgaagaatctgtttcagttcaaggtgttaataggcctaaagttggtaatgctaacacacagatggaggatacggatgaggccaaagttctagtgggttgttcagttgagagtgaggagaaagagaaaactcttcaatcccacatacctggtgatgatgctgatacagaacaaaatcctgaagaatctgtttcgaattttgataggcctaaagatgggactgctgacacacatatggaggatatcgatgatgccaaacttctagtgggttgttcagttgagagtgaggagaaagagaaaagtcttcaatcccatatgcccagtgatgatgctgttctccatgcgccttttgagaacacaaaagacagtaaaggagatgatttacatggagagtctcttgtttcctgtccaacaatggaagtgatggaacagaaggggtttgaatcagagacacatgctcgtacagattcaggtggtattgataggggaaatgaggtatcagaaaatatgtctgatggcgtcaaaatgaatatttcatctgtgcaggtcccggatgcatcacatgatttaaatgtatcacaggatcaaacagacattcccctagttggtgggatagaccctgaacacgtacaagagaatgtggatgtacctgcatcacctcacggagcagcgccaaacattgtgattttccagtctgagggacatctgtctccaagtatcttaccggacgatgtggcaggacaactagaaagcatgtctaatgacgaaaaaacgaatatttcatctgagcaggtcccagatgtatcacatgatttgaaagtgtctcaggatcaaactgacattcccccagttggtgggatagtgcctgaaaatttgcaagagattgtggatgtacctgcatcacctcatggagtagtgccagacgttgttgtttcccagtctgaggaaattcaatctccaagtattttgcccgacgatgtaccaggacaaccagacgatggcaactgtgagaaaatggataccatgcagaacaatacctctattgatattggcataacttcaggtaagacatgtcagccttcatcttctacccagcctgaggatgagaacagaaatagcttatcacactgtgaaccgtcagaagtagttgaacaaagggattcaagagatcaagtttgcatagggtctgtggaatctcaagtagagatcagctctgctatactggaaaatagatcagctgatatccagcccccgcaatccattttggttgatcaaaaggatattgaagaatccaaagaacctggtatcgagagtgctgatgtgtctttacaccaattagctgatatccaggccgagccatccaatttggttgatcaaatggatattgaagaatccaaagaacctggtaccgagagtgctgatgtgtctttacaccaattagctgatatccagcccgggccatccattttggttgatcaaatggatactgaaaaatccaaagaacctggtaccgagagtgctgatgtgtctttacaccaattagctgatatccagcccgggccatccattttggttgatcaaatggatactgaaaaatccaaagaacctggtaccgagagtgctgatgtgtctttacaccaattagctgatatccagcccgggccatccattttggttgatcaaatggatactgaagaattcaaaaatcctgatgtgtctttacaccaattagctgatattgagccctcactgtctatttcagctgtgcaaaagaatattgaggataaggatcaaagtcacgttgaaactgctggatctgagttagttgatgtctctgccgaatgttcaacagaacctcaagttcaattaccgccatcttcagagccagtgggagatatgcacgttcatttaggggcaagcaaatcagaaatagttgccgaaggtactgacttctcttcatctctcccgaagacggaggaagaaaatgccaagagccaattagctgacaccgagccatcatcgtctcttacagctgtgcaaaagaacattgaagatcaagttgaaactgctggatgtgaatttgttgttgtctctaccggatgttcaacagaaccacaagttcaattaccgccgtccgcagagccagtggttgctgaaggtacagaattcccttcttccctcctaatgaccggggtagataattcttcccatctaatgaccggggtagataatgccaagacccatctcgctgatgttgtgccttcatcgtcacctacaactatggaaaagaacattgaagctcaagatcaagatcaagttacaactggtggatgtggtctagttgatgtcttgaccgaatgttcgtcagaacctcaacttcaactgccgccatccgcagaaccagtgatttctgaaggtacagaactcgctacactcccattgacggaggaagaaaatgctgatagccaattagctaatattgagccctcatcgtctccttcagttgtggaaaagaacattgaggctcaagatcaagatcaagttaaaactgctggatgtgagttagtctcgactggatgttcgtcagaaccacaagttcatttaccgccctccgcagagccagatggagatatacacgttcacttaaaggaaacagagaaatctgaaagcatggttgtggttggcgaaggtacagcattcccttcatctctcccagtgacagaggaaggaaatgctgagagccaattagctgacactgagccctttacgtctcctacagttgtggaaaagaacattaaggatcaagaacaagttgaaactactggatgtgggttagttgatgattctaccggatgttcgtcagaacctcaagttcaattaccgccatccgcagagccaatggaaggtacacacatgcacttagaggaaacaaagaaatctgaaactgtagttaccgagattcaattagctgatatagatccctcattttctcttatagttgtgcaaacgaatattgaggatcaagatcaaattgaaacaggtggatgtgatttaattaatgtcccttccggatgttcaacagaacctcaaattcaattatcgtcatccgcagagcccgaggaaggtatgcacattcacttagaggcagcaatgaactctgaaacggtggttactgaaggttcagaactcccttcatctctcccaatgacggaggacgaaaatgctgatggccaattagctgaagtcgagccctcagtgtctcttacagttgagcaaactaacattgaggagaaagatcacattgaaactgccgaatgtgagttagttgatgtctctcccggatgttcatcacaacctgaagttaaatttccgccatccccagatgcagtgggaggtatggacgttcacttagaaaccgttgttactgaagacacagattcaaattcatccctcccgaagacggaggaaaaagatgccgagaatccatcagacaggcttgacggtgaatccgatggtacaactgttgctactgttgaaggaacttgtgttgagtcgaattcattggtcgccgaagagagcaacatagaagtgccaaaagacaatgaagatgtgtagttcatttcatctaatattaagttgtaaaacttttaatatctaatataacaaacccaatgttgaagatgtattgactgcatctgacttatttaacttatcctctcatttgggaatattaatagggcttagaatc

SEQ ID NO: 22 - protein, 3529 aa, Arabidopsis thaliana
MTSSSHNIELEAAKFLHKLIQDSKDEPAKLATKLYVILQHMKTSGKENTMPYQVISRAMDTVVNQHGLDIEALKSSCLPHPGGTQTEDSGSAHLAGSSQAVGVSNEGKATLVENEMTKYDAFTSGRQLGGSNSASQTFYQGSGTQSNRSFDRESPSNLDSTSGISQPHNRSETMNQRDVKSSGKRKRGESSLSWDQNMDNSQIFDSHKIDDQTGEVSKIEMPGNSGDIRNLHVGLSSDAFTTPQCGWQSSEATAIRPAIHKEPGNNVAGEGFLPSGSPFREQQLKQLRAQCLVFLALRNGLVPKKLHVEIALRNTFREEDGFRGELFDPKGRTHTSSDLGGIPDVSALLSRTDNPTGRLDEMDFSSKETERSRLGEKSFANTVFSDGQKLLASRIPSSQAQTQVAVSHSQLTFSPGLTKNTPSEMVGWTGVIKTNDLSTSAVQLDEFHSSDEEEGNLQPSPKYTMSQKWIMGRQNKRLLVDRSWSLKQQKADQAIGSRFNELKESVSLSDDISAKTKSVIELKKLQLLNLQRRLRSEFVYNFFKPIATDVEHLKSYKKHKHGRRIKQLEKYEQKMKEERQRRIRERQKEFFGGLEVHKEKLEDLFKVRRERLKGFNRYAKEFHKRKERLHREKIDKIQREKINLLKINDVEGYLRMVQDAKSDRVKQLLKETEKYLQKLGSKLKEAKLLTSRFENEADETRTSNATDDETLIENEDESDQAKHYLESNEKYYLMAHSIKENINEQPSSLVGGKLREYQMNGLRWLVSLYNNHLNGILADEMGLGKTVQVISLICYLMETKNDRGPFLVVVPSSVLPGWQSEINFWAPSIHKIVYCGTPDERRKLFKEQIVHQKFNVLLTTYEYLMNKHDRPKLSKIHWHYIIIDEGHRIKNASCKLNADLKHYVSSHRLLLTGTPLQNNLEELWALLNFLLPNIFNSSEDFSQWFNKPFQSNGESSAEEALLSEEENLLIINRLHQVLRPFVLRRLKHKVENELPEKIERLIRCEASAYQKLLMKRVEDNLGSIGNAKSRAVHNSVMELRNICNHPYLSQLHSEEVNNIIPKHFLPPIVRLCGKLEMLDRMLPKLKATDHRVLFFSTMTRLLDVMEDYLTLKGYKYLRLDGQTSGGDRGALIDGFNKSGSPFFIFLLSIRAGGVGVNLQAADTVILFDTDWNPQVDLQAQARAHRIGQKKDVLVLRFETVNSVEEQVRASAEHKLGVANQSITAGFFDNNTSAEDRKEYLESLLRESKKEEDAPVLDDDALNDLIARRESEIDIFESIDKQRKENEMETWNTLVHGPGSDSFAHIPSIPSRLVTEDDLKLLYETMKLNDVPMVAKESTVGMKRKDGSMGGLDTHQYGRGKRAREVRSYEEKLTEEEFEKLCQTESPDSPQGKGEGSERSLANDTSNIPVENSSDTLLPTSPTQAITVQPMEPVRPQSHTLKEETQPIKRGRGRPKRTDKALTPVSLSAVSRTQATGNAISSAATGLDFVSSDKRLEAASHPTSSLALTSPDLSGPPGFQSLPASPAPTPIRGRGRGRSRGRGAGRGRRVEGVLHGSNSSITQRTETATSLASDAEATKFALPRSASEIVSRVPKANEGSTSNPDQVSPVHSATTALRSDKAADKDLDAPPGFDSGSHVQTLNVLENSSERKAFAVKKRPLIQGVSSQHPGPNKQPLDLPVSTSSTLLGGGPVQNQNAVSSVCDGSKSPSEGRTYTALQGVTTAPSDATLPMSSQPSDATLPMSSQPVGSTVEAQEANVPSLPAALPAKRRVRNLPSRGETPKRQGKRRGQPLPATDASSARSTGLTPQIEVKVGNLSGTKAKFDAVAKEQPHFSQSVAPDIHSSGSLSQEIRRDTSGTGGSARKQTADVTDVARVMKEIFSETSLLKHKVGEPSATTRTNVPDAQSPGEMNLHTVETHKAEDSSGLKNQEALYNLSKADKLVSDIPHPVPGDLTTSGSVANKDVDIGSSKVAAENELVKIPGGDVDSSVIQLSLGNTLTAKSSLEKCTADQLLGEKLSQEGETTPASDGETCHLAEETASSLSYVRSEPTASASTTAEPLPTDKLEKNISFQDEVKTLNGDKREAILLSSEEQTNVNSKIETNSEELQASRTDEVPHVDGKSVDVANQTVKEDEAKHSVEIQSSMLEPDELPNAGQKGHSSIDLQPLVLVTSNENAMSLDDKDYDPISKSADIEQDPEESVFVQGVGRPKVGTADTQMEDTNDAKLLVGCSVESEEKEKTLQSLIPGDDADTEQDPEESVSDQRPKVGSAYTQMEDTDEAKLLMGCSVESEEKEKTLQSHIPGDDADTEKNPEESVSVQGVDRPKVGTTDTQMEDTNDAKLLVGCSVASEEKEKTLQSHIPGDDADTEQNPEESVSVQGVNRPKVGNANTQMEDTDEAKVLVGCSVESEEKEKTLQSHIPGDDADTEQNPEESVSNFDRPKDGTADTHMEDIDDAKLLVGCSVESEEKEKSLQSHMPSDDAVLHAPFENTKDSKGDDLHGESLVSCPTMEVMEQKGFESETHARTDSGGIDRGNEVSENMSDGVKMNISSVQVPDASHDLNVSQDQTDIPLVGGIDPEHVQENVDVPASPHGAAPNIVIFQSEGHLSPSILPDDVAGQLESMSNDEKTNISSEQVPDVSHDLKVSQDQTDIPPVGGIVPENLQEIVDVPASPHGVVPDVVVSQSEEIQSPSILPDDVPGQPDDGNCEKMDTMQNNTSIDIGITSGKTCQPSSSTQPEDENRNSLSHCEPSEVVEQRDSRDQVCIGSVESQVEISSAILENRSADIQPPQSILVDQKDIEESKEPGIESADVSLHQLADIQAEPSNLVDQMDIEESKEPGTESADVSLHQLADIQPGPSILVDQMDTEKSKEPGTESADVSLHQLADIQPGPSILVDQMDTEKSKEPGTESADVSLHQLADIQPGPSILVDQMDTEEFKNPDVSLHQLADIEPSLSISAVQKNIEDKDQSHVETAGSELVDVSAECSTEPQVQLPPSSEPVGDMHVHLGASKSEIVAEGTDFSSSLPKTEEENAKSQLADTEPSSSLTAVQKNIEDQVETAGCEFVVVSTGCSTEPQVQLPPSAEPVVAEGTEFPSSLLMTGVDNSSHLMTGVDNAKTHLADVVPSSSPTTMEKNIEAQDQDQVTTGGCGLVDVLTECSSEPQLQLPPSAEPVISEGTELATLPLTEEENADSQLANIEPSSSPSVVEKNIEAQDQDQVKTAGCELVSTGCSSEPQVHLPPSAEPDGDIHVHLKETEKSESMVVVGEGTAFPSSLPVTEEGNAESQLADTEPFTSPTVVEKNIKDQEQVETTGCGLVDDSTGCSSEPQVQLPPSAEPMEGGCDLINVPSGCSTEPQIQLSSSAEPEEGMHIHLEAAMNSETVVTEGSELPSSLPMTEDENADGQLAEVEPSVSLTVEQTNIEEKDHIETAECELVDVSPGCSSQPEVKFPPSPDAVGGMDVHLETVVTEDTDSNSSLPKTEEKDAENPSDRLDGESDGTTVATVEGTCVESNSLVAEESNIEVPKDNEDV

SEQ ID NO: 23 - DNA, 6579 bp, Arabidopsis thaliana
atgcaatctggaggcagtggcggagggcccgctcggaatccggccatgggtccggctggtcggactgcttccacgtcatccgctgcttctccttcttcttcctcttcatctgtgcagcagcagcaacagcaacagcaacagcagcaacagcaacagcagctggcgtctaggcagcagcagcagcagcacagaaactcagatacaaacgaaaatatgtttgcatatcaacctggtggggttcagggaatgatgggcggtggcaactttgcttcgtctccgggctctatgcaaatgcctcagcagtctagaaatttttttgagtctcctcagcaacaacaacaacaacaacaacagggttcttctacccaagagggccagcaaaattttaatccaatgcagcaagcgtatattcagtttgctatgcaggctcagcatcaaaaagcacagcagcaagctaggatgggaatggtgggttcatcaagtgtgggaaaggatcaagatgcacgaatgggaatgttgaatatgcaagacttgaatccgtctagtcagccccaggcctcatcatcgaagccatcgggcgatcagtttgctcgcggtgaaaggcagactgaatcaagttctcagcaaaggaacgaaacaaaatctcatcctcagcagcaggtgggtaccggacaactaatgcctggaaatatgataaggccaatgcaagcaccacaggctcagcagcttgtcaataacatgggaaacaaccaactcgcatttgcacaacagtggcaggcaatgcaggcatgggcgcgtgagcgtaatatcgatctctcacatcctgccaacgccagccaaatggcacacatccttcaggcaagaatggctgctcaacagaaagctggtgaaggcaatgtggcctcacagtcaccatctattccaatctctagccagccggcttcatcttcggttgttccaggtgagaattcaccacatgccaactctgctagtgatatctctgggcagtcaggatcagcgaaggccagacatgcattatctactggctcatttgcctcgacttccagtcccagaatggtcaatcctgctatgaatcccttctccggccaagggagagagaatccaatgtatcctcgacatttagttcagcctacaaatgggatgccctcaggaaatcccctgcagacttctgcaaatgagactcctgttttggatcagaatgcatctacaaaaaaaagtttaggtcctgctgaacatttgcaaatgcagcagcctaggcaactgaatacaccgactccaaatttagtagcgccatctgatactggtccactcagtaactcgtcccttcagagtggacaggggacccaacaagcacagcagcgatcaggatttaccaaacagcaactccatgttctcaaagcccagatactggcatttaggcgtttgaagaaaggggaaggttctttgcctccggagcttcttcaagctatttctccaccaccgcttgaactacagacgcagaggcaaatatctcctgccatagggaaagttcaggatagatcttcagacaaaactggagaagaccaagcaaggtcgctagagtgtggcaaggagtctcaggctgctgcttcttcaaatggaccaattttttctaaagaggaagataatgttggagatacagaagtagctttgacgacaggccacagccaattatttcaaaacctgggaaaagaagctacttctactgacgtggctacgaaagaggagcaacagactgatgtattccctgttaagtcagaccaaggagcagattctagtactcaaaagaatcctagaagtgattctacagctgataagggaaaggctgttgcatctgatggaagccaatctaaggttcctccacaagcaaactctccccagccgcccaaggatacagcctctgccaggaaatattatggaccgttgtttgattttccctttttcactcgaaaacttgactcttatgggtctgcaacagccaatgccaataacaatctcacattagcatatgatattaaagatctgatttgtgaagaaggtgcagagttccttagtaagaaaagaacagacagtttgaagaagataaatggtctgctagcaaaaaatttagaaaggaaaaggattaggcctgatcttgttttacggcttcaaattgaagagaaaaagcttaggctatctgatcttcagtctcgtgttagagaggaagtagatcgacaacaacaggagataatgtccatgccggataggccgtaccgcaaatttgtgaggttatgcgaacggcaacgcctagaaatgaatagacaagtactggccaatcagaaagctgtcagagagaagcagctgaaaaccatttttcagtggcgtaagaaactccttgaggctcattgggctatacgtgatgcacgcactgctcgtaacaggggagtggccaaataccatgaaaagatgttgagagagttttcaaagagaaaagatgatggccgcaacaaaaggatggaggccttgaagaataatgatgtagaaagatacagggagatgttgctggaacagcaaactaatatgcctggtgatgctgctgaaagatatgctgttctctcttcatttttgacccaaaccgaagattatcttcataaacttggaggtaagattactgccacaaaaaatcaacaggaagtggaggaggcagcaaatgctgcagcagtagcagcgagattgcaggggttgtcagaagaagaggtcagggcagcagctacttgtgctcgagaagaagttgtgatcagaaatagatttacggaaatgaatgcgccaaaagaaaattcatctgtcaacaagtactatactctggctcatgctgtaaatgaagtggttgtaagacaaccttcaatgcttcaggctggaactttgcgtgattaccagctggttggattacaatggatgctatcgttgtataataacaaattaaacgggatcttggctgatgagatgggtcttggaaaaactgttcaggtaatggcactgattgcttaccttatggagtttaaagggaattatggaccgcatctcatcatcgttcccaatgctgttctggtgaattggaagagtgaactccatacttggctgccatctgtttcatgcatatattatgttggtacaaaggatcaacgttcaaaattgttctctcaggtaaaatttgaaaaattcaatgtcctcgttacgacttatgagttcattatgtatgatcgatcaaaactctcaaaagttgactggaaatatattataattgatgaagcacaacggatgaaggacagagaatctgttttggcccgagatcttgaccggtatcgctgccagaggagattacttctcactggaacacctttgcagaacgatctgaaagagctttggtcactattgaaccttctccttcctgatgtctttgacaatcgaaaagcatttcatgattggtttgcgcaaccctttcaaaaagaaggtcctgcgcataatatagaagatgactggctggagactgaaaaaaaggtcatagtcattcacagacttcatcaaattttagagccattcatgctcagacgccgtgttgaggatgtggaagggtcacttcctgctaaggtttctgtagtcttacgatgtagaatgtctgctattcagagtgccgtttatgattggattaaagcgactggaactcttagagttgatccagacgatgaaaaacttagggctcaaaagaatccgatataccaagccaagatatatagaactttaaataataggtgcatggagttgaggaaagcctgcaatcatcctttgctcaattatccatatttcaatgacttttccaaagatttcctcgtaaggtcatgtggaaaattgtggattctggacaggatccttataaagctacagaggacaggccatcgtgtattgctcttcagtacaatgactaaacttcttgatatcttggaagagtatctacaatggagaaggcttgtatacagaagaattgatgggactaccagcctagaagatcgggaatcagctattgtggacttcaatgatcctgatacggattgctttatcttcttgcttagtatacgtgcagctggacggggtctcaaccttcagactgctgacacagttgttatatatgatcctgatccaaatcccaagaatgaggaacaagcagttgccagagcccatcgtatagggcagacaagggaagtaaaagtgatttatatggaggcagttgttgaaaaactctccagccatcaaaaggaggacgagcttagaagtggtggttcagtagacctagaggatgacatggctgggaaggaccgatatataggatctatagagggtctcataaggaataatattcaacagtataagattgacatggctgatgaggtcattaatgctggtcgttttgaccaaaggacaactcatgaagagcgacgaatgacattggagactttattgcatgacgaagagagatatcaagaaactgtccatgatgtaccttctctgcatgaggtgaacagaatgattgccagaagcgaggaggaagttgagttatttgatcagatggatgaagaatttgactggacggaggagatgactaatcatgagcaggtgcctaagtggcttcgagctagtaccagagaggtgaatgctactgttgctgatttgtctaagaaaccgtcaaagaacatgttgtctagcagtaacctgattgtacaacctggtggacctggaggtgagagaaaaaggggccggcccaagagcaaaaagattaactacaaggaaattgaagatgacattgcaggttactctgaggaaagctctgaggaaaggaacattgattctgggaatgaagaagagggagatattcgacaatttgatgatgatgaacttactggcgctcttggagatcatcaaaccaacaagggagaatttgatggagagaaccccgtctgtggttatgattatcctccgggttctggtagttataaaaaaaatcctcctcgtgatgatgctggttcgtcaggatcttctccagagagccatagatcgaaagaaatggcatctcctgtttcttcacaaaagtttggctctttgtctgcattggacactaggccaggttctgtctctaaaagactgctggatgacctagaagagggggaaatagcagcatcaggggattctcacatagatctccaacgatcaggaagttgggcccatgaccgtgatgaaggggatgaagaacaggttctgcaacctacgataaaacggaaacggagtattcgtctaagaccccgtcagacggcagaaagagttgacggtagtgagatgcctgcagctcagccattgcaagtggatcgtagctaccgatcaaagttaaggacagttgttgactcgcatagttcaagacaagatcagagtgattcgtcctcgagactaaggagtgtacctgcaaagaaggtagctagtacttccaaactccatgtctcatcaccaaaatctggtagattgaatgctacacagcttaccgtggaggataacgctgaagcttccagagaaacatgggatggaactagtcctattagctcttcaaatgctggtgcaagaatgtcccacatcatacagaaacggtgcaaaatcgtgattagcaagctccagaggagaatcgacaaggaaggtcagcagattgtacctatgctgacaaatttgtggaagagaattcagaatggttatgcagctggaggtgtaaataaccttttggaactacgagagatagaccaccgggtagaaagactagagtatgcaggagttatggaactcgcatctgacgtgcagttaatgctaaggggagcaatgcaattctatgggttttcacatgaggtgagatctgaagcaaagaaggttcacaatctgttctttgatctattaaagatgtctttcccagacacagatttccgggaagcaaggaatgctctttccttttctggctcagccccaactttggtgtctacaccaaccccaagaggagcaggaattagccaaggcaagaggcaaaagttagtaaacgagccggaaaccgagccaagctctcctcagagatctcaacaacgtgagaactcaaggatcagagtacagataccgcagaaagaaacaaagcttggggggacaacaagccacactgatgaatccccaatattagctcatccaggggaattagtaatctgcaagaaaaagaggaaagaccgagagaagtctggtccgaaaacccgaactggtggctccagcagcccagtttcaccacctccagcaatgattggtcgtggtcttagaagtcctgtgtctggtggagttccaagggaaacaaggctagcacaacagcagcggtggccaaaccaacccactcatccaaacaacagcggtgcggccggtgattctgtgggatgggcaaatccggtgaagaggttaaggacagattctggtaaaagacggcctagccatttatag

SEQ ID NO: 24 - protein, 2193 aa, Arabidopsis thaliana
MQSGGSGGGPARNPAMGPAGRTASTSSAASPSSSSSSVQQQQQQQQQQQQQQQLASRQQQQQHRNSDTNENMFAYQPGGVQGMMGGGNFASSPGSMQMPQQSRNFFESPQQQQQQQQQGSSTQEGQQNFNPMQQAYIQFAMQAQHQKAQQQARMGMVGSSSVGKDQDARMGMLNMQDLNPSSQPQASSSKPSGDQFARGERQTESSSQQRNETKSHPQQQVGTGQLMPGNMIRPMQAPQAQQLVNNMGNNQLAFAQQWQAMQAWARERNIDLSHPANASQMAHILQARMAAQQKAGEGNVASQSPSIPISSQPASSSVVPGENSPHANSASDISGQSGSAKARHALSTGSFASTSSPRMVNPAMNPFSGQGRENPMYPRHLVQPTNGMPSGNPLQTSANETPVLDQNASTKKSLGPAEHLQMQQPRQLNTPTPNLVAPSDTGPLSNSSLQSGQGTQQAQQRSGFTKQQLHVLKAQILAFRRLKKGEGSLPPELLQAISPPPLELQTQRQISPAIGKVQDRSSDKTGEDQARSLECGKESQAAASSNGPIFSKEEDNVGDTEVALTTGHSQLFQNLGKEATSTDVATKEEQQTDVFPVKSDQGADSSTQKNPRSDSTADKGKAVASDGSQSKVPPQANSPQPPKDTASARKYYGPLFDFPFFTRKLDSYGSATANANNNLTLAYDIKDLICEEGAEFLSKKRTDSLKKINGLLAKNLERKRIRPDLVLRLQIEEKKLRLSDLQSRVREEVDRQQQEIMSMPDRPYRKFVRLCERQRLEMNRQVLANQKAVREKQLKTIFQWRKKLLEAHWAIRDARTARNRGVAKYHEKMLREFSKRKDDGRNKRMEALKNNDVERYREMLLEQQTNMPGDAAERYAVLSSFLTQTEDYLHKLGGKITATKNQQEVEEAANAAAVAARLQGLSEEEVRAAATCAREEVVIRNRFTEMNAPKENSSVNKYYTLAHAVNEVVVRQPSMLQAGTLRDYQLVGLQWMLSLYNNKLNGILADEMGLGKTVQVMALIAYLMEFKGNYGPHLIIVPNAVLVNWKSELHTWLPSVSCIYYVGTKDQRSKLFSQEVCAMKFNVLVTTYEFIMYDRSKLSKVDWKYIIIDEAQRMKDRESVLARDLDRYRCQRRLLLTGTPLQNDLKELWSLLNLLLPDVFDNRKAFHDWFAQPFQKEGPAHNIEDDWLETEKKVIVIHRLHQILEPFMLRRRVEDVEGSLPAKVSVVLRCRMSAIQSAVYDWIKATGTLRVDPDDEKLRAQKNPIYQAKIYRTLNNRCMELRKACNHPLLNYPYFNDFSKDFLVRSCGKLWILDRILIKLQRTGHRVLLFSTMTKLLDILEEYLQWRRLVYRRIDGTTSLEDRESAIVDFNDPDTDCFIFLLSIRAAGRGLNLQTADTVVIYDPDPNPKNEEQAVARAHRIGQTREVKVIYMEAVVEKLSSHQKEDELRSGGSVDLEDDMAGKDRYIGSIEGLIRNNIQQYKIDMADEVINAGRFDQRTTHEERRMTLETLLHDEERYQETVHDVPSLHEVNRMIARSEEEVELFDQMDEEFDWTEEMTNHEQVPKWLRASTREVNATVADLSKKPSKNMLSSSNLIVQPGGPGGERKRGRPKSKKINYKEIEDDIAGYSEESSEERNIDSGNEEEGDIRQFDDDELTGALGDHQTNKGEFDGENPVCGYDYPPGSGSYKKNPPRDDAGSSGSSPESHRSKEMASPVSSQKFGSLSALDTRPGSVSKRLLDDLEEGEIAASGDSHIDLQRSGSWAHDRDEGDEEQVLQPTIKRKRSIRLRPRQTAERVDGSEMPAAQPLQVDRSYRSKLRTVVDSHSSRQDQSDSSSRLRSVPAKKVASTSKLHVSSPKSGRLNATQLTVEDNAEASRETWDGTSPISSSNAGARMSHIIQKRCKIVISKLQRRIDKEGQQIVPMLTNLWKRIQNGYAAGGVNNLLELREIDHRVERLEYAGVMELASDVQLMLRGAMQFYGFSHEVRSEAKKVHNLFFDLLKMSFPDTDFREARNALSFSGSAPTLVSTPTPRGAGISQGKRQKLVNEPETEPSSPQRSQQRENSRIRVQIPQKETKLGGTTSHTDESPILAHPGELVICKKKRKDREKSGPKTRTGGSSSPVSPPPAMIGRGLRSPVSGGVPRETRLAQQQRWPNQPTHPNNSGAAGDSVGWANPVKRLRTDSGKRRPSHL

SEQ ID NO: 25 - DNA, 2330 bp, Arabidopsis thaliana
gctttcattctttggatgcgctgttgtcaacttgtccctcgctgcctctgcttcttaactctttctttatcacttttccactcccaaatcaatttttaggttttttttataattataatttatttgctctcggcaggatctatataatacacagaccagtctttgcgtgtgcttgtgtgcattcattgatcgggtttatatcttttcatcggattttctttgtcgagcaagagccatgtcactgagacccaacgctaagacggaggttcgccggaaccgatacaaagttgcagtggatgcggaggaaggacgacggaggagagaagacaacatggttgagatccgtaaaagcaagcgtgaggagagtttgatgaagaagagacgtgaaggtatgcaagctcttcagggtttcccttcagcttccgccgcctccgtcgataagaagttggatagtctgaaggatatggtcgctggggtttggtccgatgaccctgccttgcagcttgagtccactactcagttcaggaagcttctctctattgagagaagtcctccaatcgaggaagtgataagtgctggtgttgttcctaggtttgttgagtttcttaagaaagaagattaccccgccattcagtttgaggcagcttgggctctaacaaacattgcatctggaacatcggatcacactaaggttgtaatcgatcacaatgctgttccaatctttgttcagcttcttgcttcccctagcgatgatgttcgtgaacaggctgtatgggctttgggtaacgttgctggtgattcaccacggtgccgtgatcttgttcttggatgtggggcactgcttccgctgctcaatcagcttaatgagcatgctaaattgtccatgcttcgaaatgccacttggaccttgtcaaacttctgtcgtggcaagcctcagcctcactttgaccaggtcaaacctgctcttcccgcccttgaacgactaattcattcagatgatgaagaagtcttgacagatgcctgttgggctctttcttacctctctgatgggaccaatgacaaaatccagactgtcatccaggccggtgttgtcccaaaacttgttgaacttctcctccatcattctccatctgtgctaattcctgctcttcgcactgttggaaatatagttactggagatgatatacaaacacagtgcgtgatcaatagtggtgctctaccttgtcttgccaacctgctcactcaaaaccataagaaaagcataaagaaggaagcttgctggacgatttcaaacatcacagcaggcaacaaagatcagatccagacggtagttgaggctaatttgatttccccgttggtgagtctgcttcaaaatgctgaatttgacattaagaaggaagctgcatgggcaatttcaaatgcaacttcaggtggttctcatgatcaaataaaatacctggtggagcaagggtgcataaaaccattatgcgatctcctggtttgcccagatccaagaatcataactgtctgccttgaaggattggaaaacattttgaaggtgggagaggcagagaagaacttgggtcacacaggagacatgaactattacgctcagctgattgatgatgcagaagggctagaaaagatcgagaaccttcagagccatgacaacaatgagatctatgagaaggctgttaaaattctggagacatactggcttgaagaggaagatgatgagacacagcaacctccaggtgttgatggttctcaggctgggttccagtttggagggaatcaagctccagtaccatccggaggattcaacttcagctgaaggtaaataaaagaatggaattggaagcttgcaacttgagaatggtgaaaggtcagagtcagtcagagtctagtttcactgccatggttatactccaggtctggtctggtctggtctcagaggtttgtaccgggtggtcggtttaaaagtacagcgtctgagaaagtgtttggttcattgtccagggctatttttttgaaatgactggtacaccggtcgtgagtcgacctttgtgttgtttttaaattttggagggttataaaaacttacagtggagtcttttgtttttgtgttgacaacagtttgtatgtcggttaaaaaattgaaaccataaaccctttattggtcttaatatgtttggtgtctgatttcctaaggaaaggtttttttttttttggtcaaacctaaggaagggtttatcttcgagttataaagactcgaatctttatttgaattatgaagtaaagtatacataaaacagcaataaattattatg

SEQ ID NO: 26 - protein, 532 aa, Arabidopsis thaliana
MSLRPNAKTEVRRNRYKVAVDAEEGRRRREDNMVEIRKSKREESLMKKRREGMQALQGFPSASAASVDKKLDSLKDMVAGVWSDDPALQLESTTQFRKLLSIERSPPIEEVISAGVVPRFVEFLKKEDYPAIQFEAAWALTNIASGTSDHTKVVIDHNAVPIFVQLLASPSDDVREQAVWALGNVAGDSPRCRDLVLGCGALLPLLNQLNEHAKLSMLRNATWTLSNFCRGKPQPHFDQVKPALPALERLIHSDDEEVLTDACWALSYLSDGTNDKIQTVIQAGVVPKLVELLLHHSPSVLIPALRTVGNIVTGDDIQTQCVINSGALPCLANLLTQNHKKSIKKEACWTISNITAGNKDQIQTVVEANLISPLVSLLQNAEFDIKKEAAWAISNATSGGSHDQIKYLVEQGCIKPLCDLLVCPDPRIITVCLEGLENILKVGEAEKNLGHTGDMNYYAQLIDDAEGLEKIENLQSHDNNEIYEKAVKILETYWLEEEDDETQQPPGVDGSQAGFQFGGNQAPVPSGGFNFS

SEQ ID NO: 27 - DNA, 1563 bp, Arabidopsis thaliana
ctagctcatctgttttcacactctctcctagggttttatctgcgaagcccaatctagagcttccatggcgacgcataccatttctcgatccattctttgccgaccggcgaaatctctttcgtttctgttcacgcgatcctttgcttcatctgctcctctcgccaaatctccggcgtcttctctgctcagccggtcccgtcctctggtcgccgctttttcctccgttttccgtggcggccttgtgtctgtcaaaggtctctcgacgcaggctacatcgtcttctctgaacgacccgaatcccaactggtcgaacaggccacctaaggagacgatcctgctcgatggttgcgatttcgagcactggcttgtcgtcgtggagccacctcagggtgagcctactagagatgaaatcattgatagctacatcaaaaccctagctcagattgttggcagtgaagacgaagctaggatgaagatctactcggtttcaactaggtgctactatgcttttggggcacttgtgtcagaagatctttctcacaagttaaaagagttgtcaaatgtgcgctgggttcttcctgactcttacctggatgtgaggaacaaagactatggaggggaacctttcatcgatgggaaggctgttccttatgatcctaagtaccacgaggagtggataaggaacaatgctagagcaaatgaaaggaacagacgcaatgaccgtcctcgcaacaatgatagaagcagaaactttgagaggagaagagagaacatggcaggaggccctcctcctcaacgtcctcccatgggaggccctcctcctcctccgcacatcggtggctctgcacctcctccgcctcatatgggtggctctgcacctcctccacctcacatggggcagaactatggaccaccaccaccaaacaacatgggaggaccaaggcatccaccaccttatggagcaccaccgcaaaacaacatgggaggaccgaggccacctcagaactatggaggaacaccacctcccaactatggaggagcaccaccagcaaacaacatgggaggagcaccaccaccaaactatggaggaggaccaccacctcaatatggagcagtaccaccacctcaatacggaggagcacccccacagaacaacaactaccagcagcagggtagtggaatgcagcagccacagtaccagaacaactacccacctaaccgggatggcagtggcaacccctaccagggttaaagcagttgaagcagtcgtgggtttcctttttaatcatgcattctgggctgtgtatagataatttgaggaagagagagtgcagtagcaagactttaaaactccttttatctcgagtgtttatcagtctgggattatgtgagagagaatagcctaagttactgtggcatggttagaacttttcactcttgcgtttctttttagtagtttatatcctaaatcgatctcaagttcttccttgtgatgcttgctactcttatgtccactcctggttctgcattaaacgggatttagtaacatgtctcccacaggct

SEQ ID NO: 28 - protein, 395 aa, Arabidopsis thaliana
MATHTISRSILCRPAKSLSFLFTRSFASSAPLAKSPASSLLSRSRPLVAAFSSVFRGGLVSVKGLSTQATSSSLNDPNPNWSNRPPKETILLDGCDFEHWLVVVEPPQGEPTRDEIIDSYIKTLAQIVGSEDEARMKIYSVSTRCYYAFGALVSEDLSHKLKELSNVRWVLPDSYLDVRNKDYGGEPFIDGKAVPYDPKYHEEWIRNNARANERNRRNDRPRNNDRSRNFERRRENMAGGPPPQRPPMGGPPPPPHIGGSAPPPPHMGGSAPPPPHMGQNYGPPPPNNMGGPRHPPPYGAPPQNNMGGPRPPQNYGGTPPPNYGGAPPANNMGGAPPPNYGGGPPPQYGAVPPPQYGGAPPQNNNYQQQGSGMQQPQYQNNYPPNRDGSGNPYQG

SEQ ID NO: 29 - DNA, 1761 bp, Arabidopsis thaliana
ttcgtcttcgattttctctctcaacgcaaactcgtaagctgcttccattttcccttctagaccattgatttgttcttcgaaaaaaccgttctttcttttgcctctcactctagttccttctctcatttctacttctctagcttcactgacttgctgctaccactaaatcttggcatttgtggaaagttgggaatttagggtttttgggtgtgtgtgtgaaaacaatggaagcactagttgttgatgctggctctaagttcctgaaagcaggagcagcaattcctgaccagtctcctgcaatgataattccctctcaaatgaaacgaatggttgatgatgggtcttcttcagctgataaccccaccactgtctttgaggatgtcactcttgatcctattgaaaggggtttgattagagattgggatgctatggaagatctgttgcgttatgttgtctacactgggcttggatgggaagagggaaacgaaggcaatatactttttacagatccactttgtactcctaaggctattagggagcaattggtgcagttgatgtttgaaacattcaatgtctctggattttatgcatctgagcaagcagtgttgtccctttatgctgttggacgcatctccggttgcactgttgatattggtcatgggaagatagatattgccccagttcttgaaggtgcagtacaacacattgcctcgaaacggtttgagctaggtggaaccgagctaactaaattatttgcccaagagcttggaaaaaccaacccgtcgatgaatctcagcatgtctgatgttgaaaaactcaaggagcagtatgcaaactgtgccgaggacgaaattgcttacaaaaaaacccaaaactgtgaaatcgagcagcatactcttcctgatggacaggtgataagcatcgggcgagagagatactcggttggagaagctctgtttcagccatcaatactgggactggaggagcatggaatcgttgagcagcttgtccggattatctccacagtgtcatctgagaaccataggcagctcttggagaacactgtactttgtggtggtacaacctccatgacaggattcgaaagtagattccagaaagaagcaaacttgtgctcatctgccattaggccaacactggtgaaaccgccagaatatatgccggagaatttggggatgtattcggcttgggttggaggagccatactagctaaagtggtgtttccgcagaatcagcacgttactaaagcagattatgacgagactggaccatcagtggttcacaggaaatgtttctgaaaccatagactataaaacgatgttgttgttgtagctgaggattttttttttggttggctttggtttgaagatgtggaccagattatgtagtacatttcaaattatggcttccaaatatcgactaatatgtgttcaatgagcccttttctgaaaacattgacaaggtaactttgccaatgccaacacacacccattgtcagtggaactctaaatggttttgcagatatgtaaccagtgaaactcttggttttgatgcagagaatggccaagatcctctttttcattttgttttgagatctttagtacttgtacaatcaaataacacagtccctttttgttttgttggtgttgtttgctgaaattcgagaaggaaagggtcagtgttaatgtctaaacagaattcaattttttttattttgtaaattggttgcctctttaccttgtt

SEQ ID NO: 30 - protein, 363 aa, Arabidopsis thaliana
MEALVVDAGSKFLKAGAAIPDQSPAMIIPSQMKRMVDDGSSSADNPTTVFEDVTLDPIERGLIRDWDAMEDLLRYVVYTGLGWEEGNEGNILFTDPLCTPKAIREQLVQLMFETFNVSGFYASEQAVLSLYAVGRISGCTVDIGHGKIDIAPVLEGAVQHIASKRFELGGTELTKLFAQELGKTNPSMNLSMSDVEKLKEQYANCAEDEIAYKKTQNCEIEQHTLPDGQVISIGRERYSVGEALFQPSILGLEEHGIVEQLVRIISTVSSENHRQLLENTVLCGGTTSMTGFESRFQKEANLCSSAIRPTLVKPPEYMPENLGMYSAWVGGAILAKVVFPQNQHVTKADYDETGPSVVHRKCF

SEQ ID NO: 31 - DNA, 2338 bp, Arabidopsis thaliana
ccaaaatgtttttgtaaaccaacgaaattcaatctttctctctgtgccttttttcctcttttctcgttcccctctacttcatttagggtttatcatcctctaccaatccgccgattctatacatacacttttcatatatatacatacatcgtctccactctcgttggctcatttttcattcaccgccacgaagcaagaggagattcgtattagccaccatgtctttgagacctaacgctaagactgaggttcgccggaaccgctacaaagtggcggtggatgctgaggaaggaagacggaggagagaggacaacatggtcgagatccgtaagagtaagcgtgaagaaagcttacagaagaagcgtcgtgaaggccttcaagctaatcagctacctcaattcgctccttctcctgttcctgcttcatcaactgttgagaagaagttggagagtttgcctgctatggttggtggtgtttggtcagatgatagaagtttacagcttgaagcgactactcagttccggaaattgctttctattgagcgtagtcctccgattgaagaagtgattgatgctggtgttgtgcctcggtttgtggaatttctcactagagaggattatccacagcttcagtttgaggctgcttgggcattgacaaacattgcttctgggacttcagagaatacaaaggtggtcattgaacatggtgctgttccgatttttgttcaactattggcttctcagagtgatgatgtccgtgagcaggctgtgtgggcattagggaatgttgctggtgattctccacggtgcagagatcttgtccttggtcaaggagctttgataccattactctctcagttgaatgagcatgctaaactctcgatgctgagaaatgctacttggaccctctctaatttctgcaggggcaagccacagcctccctttgaccaggtccgtccagcactcccagcccttgaacgcctgattcattcgactgatgaggaagtgttaacggatgcatgttgggctctctcttacctttccgatggcacaaatgacaaaatccaatctgtcattgaggcaggtgttgttcctcgactcgtcgagcttctccagcatcaatcaccatctgtgcttattcctgcccttcgtagtattggtaacattgtcactggagatgatctgcagacacagtgtgtaattagtcatggtgcacttcttagccttttgagccttctgactcacaatcataagaagagcatcaaaaaggaagcttgctggacaatctcaaatatcactgctggaaacagggaccagattcaggctgtgtgtgaagctggtttgatttgccctcttgtcaatctgcttcaaaatgcggagtttgatataaagaaagaagctgcgtgggcaatatcaaatgccacttcaggtggttctcctgaccaaatcaagtacatggtggaacagggagtcgtgaaaccactgtgtgatcttttggtgtgccctgatccaaggattatcactgtgtgtctggaaggattggagaacattttgaaagttggggaagctgaaaaggtcacaggaaataccggggatgtaaacttttatgcacagctgatcgatgatgctgagggattagaaaagattgagaatctgcagagtcatgacaacagcgaaatctatgagaaggcagtgaagattcttgaaacgtactggttggaagaggaagatgaaactttaccacctggtgatccctctgcacaaggcttccagtttggaggaggtaatgatgcagccgtaccaccaggtggattcaacttccagtgaaggtaaaaaaacctcactacttgggactaatttatctaagcatctaaggctagactagcaaacagagtaaatctgcctgtgtgtctaccttgtgtgaatctgtgagtctggttttgcttccacaggagctgaacatgacgatttgaagagtcgaaggagcttaaagagtttgggggcactggttaaaaagggtatgattagagagtctggtcttctgtgtaaaagtcagatggggtgccttacttagtctggcctggtccggtcagatccagtggttggtgggtttgagtcatggaataagcttgttgggggggagttgggtaggagtcatcaagggatatttatttttgggaaagggtttataagtttttaaagtgtgatctgatgagaatgtgtctctctgggtttttgttacatttgtactacacaacactgcaaagtcaaacataaaaaagttggtcaaactttatttggtcttattggtgacataaaagcccaattggttcgtctct

SEQ ID NO: 32 - protein, 535 aa, Arabidopsis thaliana
MSLRPNAKTEVRRNRYKVAVDAEEGRRRREDNMVEIRKSKREESLQKKRREGLQANQLPQFAPSPVPASSTVEKKLESLPAMVGGVWSDDRSLQLEATTQFRKLLSIERSPPIEEVIDAGVVPRFVEFLTREDYPQLQFEAAWALTNIASGTSENTKVVIEHGAVPIFVQLLASQSDDVREQAVWALGNVAGDSPRCRDLVLGQGALIPLLSQLNEHAKLSMLRNATWTLSNFCRGKPQPPFDQVRPALPALERLIHSTDEEVLTDACWALSYLSDGTNDKIQSVIEAGVVPRLVELLQHQSPSVLIPALRSIGNIVTGDDLQTQCVISHGALLSLLSLLTHNHKKSIKKEACWTISNITAGNRDQIQAVCEAGLICPLVNLLQNAEFDIKKEAAWAISNATSGGSPDQIKYMVEQGVVKPLCDLLVCPDPRIITVCLEGLENILKVGEAEKVTGNTGDVNFYAQLIDDAEGLEKIENLQSHDNSEIYEKAVKILETYWLEEEDETLPPGDPSAQGFQFGGGNDAAVPPGGFNFQ

SEQ ID NO: 33 - DNA, 6499 bp, Arabidopsis thaliana
gtcagtttgaattttccgtagtagatgaacgtgcgattaggtaacagttgaggtctgacggccaggttttcttgtcaccgaatggagggaggaataaactcatggattatgatgacagtgactttcaaaaccagaatctccatttagctggtgaagccaacaacaaatttccaccagttttacagccttatgctcttccaaagtttgattttgatgatacactcaacacgcatctgaggtttgatagtttaggtgaatctgaagcttttcttggtattgagggtaacgaagataataactggattgaggatttctctcgtggaagtagtggtatagtgtttagttcaggtgcaacggagtcctgtgccatttctaggcacaataatgtttggtctgaggctacttcgtcggaatctgttgcaatgcttttgaattcagttggacaggacgaagttattgtaagagaggatactatcaagaaatctgacacttctcatgaactaggctgcacaatggaaacagtagagcctggtcagacatcccatgaaagaagtctttccaaagaggaaacggtgaacttacaacccaacccctctgtggatgatactccaggagagtcctctgtggtaaagacagatgatggacaggagcaggttctggttaaagatgactcaccaacggctgtagaagaggcatctgtggaggaaaagaattccatcttgacttctaataccgcgacggtagaggctatagatactactgatcttggtaaaataggaactgagacgacggataatcttcttgaccaaacagaagagaaagccaatgtagaatcaaggatggaagatgattgtagcgatgggaatgtacagactattattacttgtagcggtgagttgaataatcagagcactttacttccagagacttccaatgatgaaaatgttatcagcgaccacattcaaagtagttataaccgcaatgatctaactgcagatgcacggtcaattttggttgaaggtcattctgatagccatatagactcagcttccgaagttgaaaaagtggaagctgaaaatattggcaaaactgcaaagcctgatttgaaggagatagagctatctgatgtcacagtactagaaagaggggaccaagctccctctactcttgaggtaggtggacaagatgtttctgggaccgaatgccaagatctccttgtcagcactgttcatactagcgtagctgttgaagcgtctttggaacttgctggggaattgacaactataacaaacagtgtttccattgagaagcccgagttgcttagtcatcaacatatggaagttattacaagtgaacatgagtctacttttcagatagagactgagacatatccgcagatacacgtatttgaaacttcagagagtgtttatatttcaacgatggactcaatggttgaagctagagaaggtggtgtgtctaagaagagtgacaatgaaggtagtgctcgcacttctaatctcgagcaaagcatggaactgcctgtcaatgccaatgatagagatcaagatgtcaagaactctcagatcctatctgaaagcgttgtgtctggttctgttggctatgtttcaggaggctctacttcagagttggcggagtcagaatctcaatctgacagcattccaacagacaagtcagagactatgattgacagttctctcaatctcgaagaattacaacctctaagtcaagatggagcacctgctgtcagtctcacatcttcaatagatttacatatggtaaagacatcctctgatgacagtgaccaaggcagttactctgaaaccaagaaggtttatggtgaacctgaaaatggtcaaaccgttccacctgtggatgcaagttgttcagggagtcagatggaccaagaagctaggaagcgtgctgaaggtactaagcaaagtacatactctgttgaaggctgtcctcgctctgaagggtcaaaggatgcagtagatgctgatggtgttggacaagttttgcagcagcagtctgaggaattaatttttgaagagaatgtagtaacagaagctgtaaaagctcctgagactctgtcagttctggacaaggataacaaaaatgaaatgcctattactagctccttgcctattcttgggagtgaagctggaaaagatggccaggaagaggataatactgctgcttctggtgggattatggcagctgggactcctgttacacaccccaaaggtgatgcaatcgtactaggagactcccgtgcttctacatgttctgagtcttctgtaaagtcttatgtaactgcaatagaagatgctgctactaatttaaagactcctcttgattctttccccactgttaagacttccgaacttcaatttaataacacagagacaaacagtgtcaaaaagccagaagatcagaatatttcgggttttatgtctgctggatctccggtcttgaatagaaatgagacctccagcagtgaaatgaacttaactcctgatcagctgaaagcagggaaaatttccaaagctgttatattttcacaagctacccttgtctccccgattgtggtgggatctccttcaacatctagcttagataaaacagctgcaaagtcttccaaagcaaaatctgagcggaaacccaggcgaacatctaaatctgtaggaaaagagacttctagaaaaggaactagtgtaaaaggggctacacctattgaacagtttcaaagtggaggcaaaacaaatgctgttaatcaaagtttggcttctcatattcagatcacacaatctactgagaaacagcgaagtcttcagagccctgctctaaaagcttttgggtccctttcaacccctacggcaagtctaccggatttgaactcttctgctctctcaagtattctgcgtcgacctttcacggacttgcaacaagtgcaactacgtgcacagatttttgtatacggggctctgatccaaggaacagcaccggatgaagcttatatgatatctgcatttggtggtgcagatggtgggaagggcagctgggagaaatcatggcgtacttgtgttgtaagggctcagaaatcgcttgttgctactcctgaaacgccactgcaatcacgtccagggaagacagagaccccttcagcaggtcacaccaatagcaaagagagttcagggacaaaccccatgattccactctcatcacctttatggagtttatcaacttccgtagatactttacaatcaagtagcgttcagagaggttcagctgctactcaccagccattgctttctgcatcgcatgctcaccaaactccaccaactcagaatattgttggacataataccccttggatgtcgcctctccctttccgtaacgcttggcttgcttctcagcaaaccagtggatttgatgttggttcccgtttccccgtctatccaatcactgaccctgtaaaattgactcccatgaaagaatcatccatgactctttctggcgcaaaacatgttcagagtggaacttctagcaatgtttccaaagtgacaccaacacttgagcctactagtacagttgtagcacctgctcaacattctacaagggtaaaatcaaggaaacggaagaagatgccagtctctgtggagtctggtccaaacattttgaattcgttaaagcagacagaattagctgcctcacctcttgtgccttttacacctactccggctaatctgggttataatgctggcaccctgcccagtgttgtttctatgactgcagtccctatggacctggtatctacgttccccgggaagaaaataaaatcatctttcccatctccaatttttggtggtaaccttgtacgtgaagtaaagcagagatctgtcttgtcagaggatactattgaaaaacttaaggaggctaagatgcatgcagaggatgcatctgctcttgctactgcagctgttagtcatagcgaatatgtatggaagcagatagagcaacaaagtcatgctggcctccagccagaaactcaagacagattagcttcggctgctgttgccatagctgctgcagctgcggtggcaaaagctgcagctgctgccgccaatgttgcagctaatgctgcattgcaggccaagttaatggctgaagaagcatcccttccaaatgcttctgatcagggactcccaaagtcatatgatagcatattacccggtcagggtacccctgcttctatcttgaagggtgaaggtgcagtggtgaactccagttcggttcttattgctgcgagagaggcatctaagaagagggttgaagctgctacagcggccaccaagcgtgctgaaaatatggactccattgtaaaagcagcagaattggcatcagaggctgtttctcaagctggaatacttgtttcaatgggtcatcctccgttgctcaataagctggtggaggcgggtccaagtaattactggaggcaggctcaagaatctcaggaagtacagccctgtaaaacggttgtcttagaaaaagaaactgtgtctactagtgagggaacttttgctggtcccaaaattgtgcagactgagtttggtggctctgtgaatacggcagatggtgtgtccggtccagttcctgccactggaaagttaaagggacaggagggtgataaatatgcagacttggctaaaaacaatgatgtggtttttgaaccagaagttgggtcaaaattttcaattgacgcccaacagactatcaaagcaacaaagaatgaggacatcaaggagggttctaatgtagaggttttcaaagaagaacctggattaagaaccgcatggtactctgccaatgtattgagcttagaggatgataaagcttacgtgttgttcagtgacctatctgtagaacaaggaacagacaagcttaaggagtgggtagccctcaaaggggaaggtgatcaggcccctaaaataagacctgctcgttctgttactgccttgccatatgaaggaaccaggaagagacgtagagctgctcttggggatcatatttggaaaattggggatagggtagactcgtgggtgcatgacagttggttggagggtgttatcacagagaagaacaagaaagatgaaaacacagtgactgtgcattttcctgcggaagaagaaactttgacgatcaaagcttggaatcttcgtccttctcttgtgtggaaagatggaaagtggattgaatgttctagttcaggagaaactatcagctcgtcacatgagggtgatactccaaaggagaagcgtcctagattaggaactcccgctcttgtggctgaagtaaaagacacgagtatgaagattgttgatgatccagacttggggaaaccgcctcagactggtgttcttaacctcggtgtttcagagaatacttttaacattggaaagagtaccagagaggagaacaaacccgatccactccgaatgaagagaaccggtttgcaaaagcaaggatcaaaagtgatttttggtgtccctaaacctggaaagaaaaggaagttcatggacgtgagcaaacactatgtttcagaggcaagcactaaaactcaggaaaggaaggaaccagttaagcctgtgagatcaattgtgccccaaaattctggaataggtagctggaaaatgccttctaaaactatctccatagagaaacagacaacaatatctaggcccaagactttcaaacctgcgcccaagcccaaagagaaaccgggtgctacggctaggataattccccgcaaggactcgcgtaatacaacagcatcagatatggaatctgatgagagtgcagaaaacaggggtcctggatctggtgtttcatttaagggaacagtagaagagcaaaccacatcatcctctcatgatactggttcgaagaatagttcctccttgagcactaataaagggagagtggctcctactgcaggaaggttagccaaaatcgaagaggacaaggcgttggctgaaaattcttcaaaaacatcagagggaatggagccacgtagatctatccgcaggatccagccaacttctagactactcgaaggtctgcaaacgtcgatgatgacctcgaagattccttcggtatcacacagcaaaagtcacctaagtcaaagcaaaaagtagcagtagaggcaagtgaaaaggagcagaagaagcaagtgcacataaacgcaagtggaggaaacaaaagcagagcagtatcggctgctattaggttgtttgtaattttagtttcatgcttttgaaaaaaataactctttgttggttgggagagactaaaaaaagtaggggaagagaagaagaaaaatctacatatatatttttggtagactttttggccaaaaatccgttaactatttactaataacatttaggtccttacaaattatatctcaaccaaatattct

SEQ ID NO: 34 - protein, 2037 aa, Arabidopsis thaliana
MDYDDSDFQNQNLHLAGEANNKFPPVLQPYALPKFDFDDTLNTHLRFDSLGESEAFLGIEGNEDNNWIEDFSRGSSGIVFSSGATESCAISRHNNVWSEATSSESVAMLLNSVGQDEVIVREDTIKKSDTSHELGCTMETVEPGQTSHERSLSKEETVNLQPNPSVDDTPGESSVVKTDDGQEQVLVKDDSPTAVEEASVEEKNSILTSNTATVEAIDTTDLGKIGTETTDNLLDQTEEKANVESRMEDDCSDGNVQTIITCSGELNNQSTLLPETSNDENVISDHIQSSYNRNDLTADARSILVEGHSDSHIDSASEVEKVEAENIGKTAKPDLKEIELSDVTVLERGDQAPSTLEVGGQDVSGTECQDLLVSTVHTSVAVEASLELAGELTTITNSVSIEKPELLSHQHMEVITSEHESTFQIETETYPQIHVFETSESVYISTMDSMVEAREGGVSKKSDNEGSARTSNLEQSMELPVNANDRDQDVKNSQILSESVVSGSVGYVSGGSTSELAESESQSDSIPTDKSETMIDSSLNLEELQPLSQDGAPAVSLTSSIDLHMVKTSSDDSDQGSYSETKKVYGEPENGQTVPPVDASCSGSQMDQEARKRAEGTKQSTYSVEGCPRSEGSKDAVDADGVGQVLQQQSEELIFEENVVTEAVKAPETLSVLDKDNKNEMPITSSLPILGSEAGKDGQEEDNTAASGGIMAAGTPVTHPKGDAIVLGDSRASTCSESSVKSYVTAIEDAATNLKTPLDSFPTVKTSELQFNNTETNSVKKPEDQNISGFMSAGSPVLNRNETSSSEMNLTPDQLKAGKISKAVIFSQATLVSPIVVGSPSTSSLDKTAAKSSKAKSERKPRRTSKSVGKETSRKGTSVKGATPIEQFQSGGKTNAVNQSLASHIQITQSTEKQRSLQSPALKAFGSLSTPTASLPDLNSSALSSILRRPFTDLQQVQLRAQIFVYGALIQGTAPDEAYMISAFGGADGGKGSWEKSWRTCVVRAQKSLVATPETPLQSRPGKTETPSAGHTNSKESSGTNPMIPLSSPLWSLSTSVDTLQSSSVQRGSAATHQPLLSASHAHQTPPTQNIVGHNTPWMSPLPFRNAWLASQQTSGFDVGSRFPVYPITDPVKLTPMKESSMTLSGAKHVQSGTSSNVSKVTPTLEPTSTVVAPAQHSTRVKSRKRKKMPVSVESGPNILNSLKQTELAASPLVPFTPTPANLGYNAGTLPSVVSMTAVPMDLVSTFPGKKIKSSFPSPIFGGNLVREVKQRSVLSEDTIEKLKEAKMHAEDASALATAAVSHSEYVWKQIEQQSHAGLQPETQDRLASAAVAIAAAAAVAKAAAAAANVAANAALQAKLMAEEASLPNASDQGLPKSYDSILPGQGTPASILKGEGAVVNSSSVLIAAREASKKRVEAATAATKRAENMDSIVKAAELASEAVSQAGILVSMGHPPLLNKLVEAGPSNYWRQAQESQEVQPCKTVVLEKETVSTSEGTFAGPKIVQTEFGGSVNTADGVSGPVPATGKLKGQEGDKYADLAKNNDVVFEPEVGSKFSIDAQQTIKATKNEDIKEGSNVEVFKEEPGLRTAWYSANVLSLEDDKAYVLFSDLSVEQGTDKLKEWVALKGEGDQAPKIRPARSVTALPYEGTRKRRRAALGDHIWKIGDRVDSWVHDSWLEGVITEKNKKDENTVTVHFPAEEETLTIKAWNLRPSLVWKDGKWIECSSSGETISSSHEGDTPKEKRPRLGTPALVAEVKDTSMKIVDDPDLGKPPQTGVLNLGVSENTFNIGKSTREENKPDPLRMKRTGLQKQGSKVIFGVPKPGKKRKFMDVSKHYVSEASTKTQERKEPVKPVRSIVPQNSGIGSWKMPSKTISIEKQTTISRPKTFKPAPKPKEKPGATARIIPRKDSRNTTASDMESDESAENRGPGSGVSFKGTVEEQTTSSSHDTGSKNSSSLSTNKGRVAPTAGRLAKIEEDKALAENSSKTSEGMEPRRSIRRIQPTSRLLEGLQTSMMTSKIPSVSHSKSHLSQSKK

SEQ ID NO: 35 - DNA, 4075 bp, Arabidopsis thaliana
atggcttttcaaatgccctttacaacaatatcaagaaagatatcatgtatgaagttgttgcctctttgccctcttcagttgtcaacaacgcaaacacctacaacaattcccatgtctctttccttctataagaatgaactttctgatgatacaccttgtcaaagtgggtacactgattacatatcttttcaagtccccgatgagaccttcccagagatttcaaactgtattggcatagctaagggttataagcagaattccaacaatgagaaaaatggttatacttctctggaagccgttttgttatctgtacctaatggctacacttgtgttgatttgtctctctacaaggataaagaactggttttattattgaataagacaaatacagattccgaaggctcgggagaagcatgcatgatggttgtacaaactggtgacctcgcattcatttccatttcaggatctagttctctaaaccagtgggagctagaggatttgaaggtattgctaatttcaagcattaacatcgacggctcgattgtgaacctggaaatggagaatgaaaaggttcgcaaagtaccacattctgtcattgctcctctagcagtaagcgcttcaagaggagtggcttgtgtttttgctgaaagaagacgagctttggtgtacatattggaagaagatgaagatgaagaaatctctgatgaaaactcaactaaggaagcaagacgaaattctctctctttctctaagctctacgccaccgtcacggaggttgtcttgttttgtctcatggagaatgatcaattcatgtgtccgactgatataatcaccggcatagtgtttattgatggtgaattggctatgttgactttgactgccgacggggagttacggtggacagagtatggactccggcagtatttgtcgatgaagaaggatgttcttggtttcatcgtcgaaggtaagcagattagagtaaaagccgtggttgagaaagaggcaggaggaatctgctgcggacaatttggtggagacttcgtgaggaaagatttcgtctttgagcctctcatcgatcaaaatggatggtgctataagcttcgtcaataccttgattctctcggtcggccaaagagattgcttgtgtttgtgaacccgtttggcgggaagaaatcggcgagagagatttttgttaaggaagtgaagcctttgtttgaagatgctgatgttcaacttgagattcaagaaactaagtatcagttgcatgcaaaggaatttgttaagtccatggatgtgtcaaaatatgatggtattgtttgtgtcagcggcgacggtatccttgttgaggttgtaaatggactgctcgaaagagcagactggagaaatgccttaaaattgcctattggaatggtccctgcaggaactggtaatggcatgataaagtcattgttggacacagttgggcttcgatgctgtgcaaatagtgctaccatttctattatccgaggtcataaacgttctgtagatgttgctacaattgcacaagggaataccaaattcttcagtgtcttgatgcttgcttggggtttaatagctgatatagacatcgagtcagagaagttcagatggatgggaagtgctcgtattgacttttatgtatgtttagttgacaaatttgacaattattgcattgcagttgttaaattgctggctcttcagaggataatatgtttaagacgatacaatggacgaattttatttctaccggctcctgggtttgaaggctatggacagccagccagttgcagtctataccaagagccacatgttagtgataaagaggtcgggtaccaaggacctgaaactaaatttgaagatctagaatggagggaaatgaaaggcccatttgttacgatatggcttcacaatgttccctggggttctgagaacactttgactgctcctgctgcaaagttttctgatggctacctggacttgattgtcttgaaaaactgccctaagcttgtcctgctctcacttatgagacagacgagtagtggaacacatgttgagtcaccatatatagtgtatataaagcttactgtcgaaaaggtgaaggcatttgtgctggagccgggtgcacttgtagacgaaccagacaaggaaggaatcatagattcagatggagaggttttggcaagaggaaaaagaacatataaatgtgatcaaaaggccttgatgtcttacgacaagcttcaagtaacagttgatcaagaaagattgttctgtaaattttgtataagccagagggagctagtacttgctaagctctcaccaacgacgaaactcgtctccctccatcttgctatggatcgtcagccggagagggagaatgatgaactaccatctccggcgataatttccgaccgagttctggtaaatggtgttgtcacgccgttaacgttgaccgccgagggagagctacgatcgacggaatctggacggcggaaatcgacgttggcaaaagaaatcctgagtttcgtcgtggaaggtaacaaggttagagtaaagaccttggttgagaaaggaggaggaatttgctgtagaggaagtgctggagattatgcgaggaacgatttcgttttcgagcctctctctgatgaatctagaaagctttggtccgataagttccatcaacacctcgtctctctcggtcggccaaagaaattgcttgtgtttgtgaatccgtttggcgggaagaaaacagcgagaaagatatttcaagaggaagtaaagccattgtttgaagatgcaaatattcaacttgagattcaagaaaccaagtatcagttgcatgcaaaggaaattgttaggtccatggatgtatcaaaatacgatggtattgtttgtgttagcggtgacggtatccttgttgaggttgtaaatggactgcttgaaagagaagactggaagactgccataaaattgccgatcggaatggtccctgcaggaagtggtaatggcatgattaaatcattgttggaaccggtagggcttccttgtagtgcaacaagtgctactatttcgataatccgaggtcgtacacgttctctagatgtagcaactatctcacaagggactaccaaattcttcagtgtcttgatgcttgcttggggtttagtggctgatatagacatcgagtcagagaaattcagatggatgggtagtgctcgctttgatatctatggtcttcagaggataatatgcttaagacaataccatggacgaattctatttgtgccagctcctgggttcgaaagctatgggcaacgagccagttgcagtatagataaagagccatctggtagtgataagacactcgtataccaaggacctgatagtaaacttgaaaatctggattggagagaaatgaaaggcccatttgtttcagtatggcttcataatgttccctggggtgctgagaacactttggctgctcctgacgctaagttttctgatggcttcctggatttgattgtcatgaaagactgtcctaaactagccttgctatcacttatgacaaagttgagtgatggaacccatgtccaatcaccatatgcatcatatctgaaggtgaaggcattcgtactggagccaggtgcacgcatagacgaaccagacaaggaaggaatcatagattcagatggagaagttttggcaagaggaagaaaatcgtacaaatgtgatcaaaaggctttgatgtcttacgacaagcttcaaataagtgttgatcaaggtttagccactctcttctctcctgaataattctgactgatacatgagatgtgatgagatgagatgaagttgtcccttgtggctataatttgattgatggacattacaatacaaaaaatgagaagatgattcgagttatatagtaaatccctaaagattaccattgagtgtattgtttattgttgtattgctgttgtattgcagttttgagttttttgttagaaagttgtgtgaactaagatattgagaagaccataaatactaaatgtgagattttttt

SEQ ID NO: 36 - protein, 1274 aa, Arabidopsis thaliana
MAFQMPFTTISRKISCMKLLPLCPLQLSTTQTPTTIPMSLSFYKNELSDDTPCQSGYTDYISFQVPDETFPEISNCIGIAKGYKQNSNNEKNGYTSLEAVLLSVPNGYTCVDLSLYKDKELVLLLNKTNTDSEGSGEACMMVVQTGDLAFISISGSSSLNQWELEDLKVLLISSINIDGSIVNLEMENEKVRKVPHSVIAPLAVSASRGVACVFAERRRALVYILEEDEDEEISDENSTKEARRNSLSFSKLYATVTEVVLFCLMENDQFMCPTDIITGIVFIDGELAMLTLTADGELRWTEYGLRQYLSMKKDVLGFIVEGKQIRVKAVVEKEAGGICCGQFGGDFVRKDFVFEPLIDQNGWCYKLRQYLDSLGRPKRLLVFVNPFGGKKSAREIFVKEVKPLFEDADVQLEIQETKYQLHAKEFVKSMDVSKYDGIVCVSGDGILVEVVNGLLERADWRNALKLPIGMVPAGTGNGMIKSLLDTVGLRCCANSATISIIRGHKRSVDVATIAQGNTKFFSVLMLAWGLIADIDIESEKFRWMGSARIDFYVCLVDKFDNYCIAVVKLLALQRIICLRRYNGRILFLPAPGFEGYGQPASCSLYQEPHVSDKEVGYQGPETKFEDLEWREMKGPFVTIWLHNVPWGSENTLTAPAAKFSDGYLDLIVLKNCPKLVLLSLMRQTSSGTHVESPYIVYIKLTVEKVKAFVLEPGALVDEPDKEGIIDSDGEVLARGKRTYKCDQKALMSYDKLQVTVDQERLFCKFCISQRELVLAKLSPTTKLVSLHLAMDRQPERENDELPSPAIISDRVLVNGVVTPLTLTAEGELRSTESGRRKSTLAKEILSFVVEGNKVRVKTLVEKGGGICCRGSAGDYARNDFVFEPLSDESRKLWSDKFHQHLVSLGRPKKLLVFVNPFGGKKTARKIFQEEVKPLFEDANIQLEIQETKYQLHAKEIVRSMDVSKYDGIVCVSGDGILVEVVNGLLEREDWKTAIKLPIGMVPAGSGNGMIKSLLEPVGLPCSATSATISIIRGRTRSLDVATISQGTTKFFSVLMLAWGLVADIDIESEKFRWMGSARFDIYGLQRIICLRQYHGRILFVPAPGFESYGQRASCSIDKEPSGSDKTLVYQGPDSKLENLDWREMKGPFVSVWLHNVPWGAENTLAAPDAKFSDGFLDLIVMKDCPKLALLSLMTKLSDGTHVQSPYASYLKVKAFVLEPGARIDEPDKEGIIDSDGEVLARGRKSYKCDQKALMSYDKLQISVDQGLATLFSPE

SEQ ID NO: 37 - DNA, 2428 bp, Arabidopsis thaliana
atagcttttttagaaggaatactgatagagagaaagaaaaatggcaaggccacgactgcttgtagtgtcgatgtcgcttccggtcactgcaaagaggactggagaagagtcttggtctttcacgatgagtcctggtggtctagttagtgctcttctaggtttgaaagaatttgagaccaaatggattggatggcctggagtagatgttcatgatgcgattggcaaaaagacactctccattaccctagctgaaaagggatgtatcccagtgtttttggaagaagtgtgtgatcaatactataatggctactgcaacaatattctgtggccgatttttcactacttgggaacgccaccagaatatcgtaacgatgcaaccataacataccagtcacagtatgaagcatacaagaaagcaaatcaaattttctttgatgttgtcaaagagcactatgaagaaggagatgtggtttggtgccatgattatcatgttatgcttcttcctcaatatcttaaggaatacaacagtaagatgaaagttggatggtttctccatacaccatttccttcttccgagatgtacaaaacattgccctcgcgatccgatctgcttcgttctgttcttactgctgatttagttggtttccatacctatgacttcgcaagacattttttgaatgcatgcatgtgtattcttggagtcgaagcaacatctgaaggaattgtggatcagggcaaagtcactcgagtagctgtttttcccattgggatagaacctgagaggtttataaacacaagtgaactctctgaagttgttcaatacatgaagaagttcaaaaacgattttggtgggagaaagttgatattaggtgttgatcgtctcgatacgatcaaagggattccacaaaaatatcaggcatttgagaagttcttagaggaaaatgcagagtggcgtggtaaagtcatgttacttcagattgcagtgccaacaaggaacggtattggtgaatatcaaaagatcaaagaccaatgtcattaccatgttggacgaattaatggtcgttttggttccatctcttctgttccaataattcacctggattgttctattgactttaatcaattatgcgcactttatgccatcacagatgtattacttgtaacatctctgagagatggaatgaaccttgtgagttctgaattcattgcctgccaaaaagcagaaaaaggggttctcattctaagcgagtttgcaggtgctggacagtcacttggtgccggagctattttagtgaatccttggaacattaaagaagtttcttctgccattggagaagctctaaatatgtcacatgaagaaaaggagagaaaacataaaatcaattttcagtatgtgaaaactcactccactcagcagtgggcagatgatttcatgaaattgactcttacaaacattttatgcagtaaacttattgagattacaaccagcgcggagctaggagctggattagccgccacacttgaacttccagaacatgatgtgattcaacaatactcaaagtctaacaatagactgctgattcttggattctatggaacgctcactcagccgatgaaaaatcaagagagaagaggcgacggaatgaatcttgaactgcatccacagctaaaagagagactcaaagaattatgcagtgatccaaaaacaacagtagttgtcctgagtagaagtgaaaaatgcatattggataaaaactttggagaatataacatgtggttggctgctgaaaatgggatgtttctaaggcatacaagtggagaatgggtgacaagaattccagaacacatgaatttggaatggattgatggtgttaagcatgttttcaagtacttcactgaaagaactccaggatcatatctcgaaacaagcgaggcttcgcttgtatggaactacgaaaatgcagatgctgaattcgggagagctcaagcaagagacatgttacaacacttgtgggcaggaccaatctctaatgcctcagtggatgttgttagaggaggccaatctgttgaagtccatgccgttggtgtgacaaagggaagtgcaatggagcgtattctcggagaaatagtgcataacaagtcaatggctacaccaattgactatgtcttgtgcattggttgtttcttggggaaagacgaagacgtttacacattcttcgagccagagttgaccaagaaagccaagtcgctttcttcttcaggtagtgactcccccaagaaggtatcatcgaccattgttgacctcaagggagagaattacttctccgtagctattggacaaacgcacacaaaggctcgctatttccttgactcatctgatgacgttgtgaaacttattggcaagctttgcacacacaacaatgcttga

SEQ ID NO: 38 - protein, 795 aa, Arabidopsis thaliana
MARPRLLVVSMSLPVTAKRTGEESWSFTMSPGGLVSALLGLKEFETKWIGWPGVDVHDAIGKKTLSITLAEKGCIPVFLEEVCDQYYNGYCNNILWPIFHYLGTPPEYRNDATITYQSQYEAYKKANQIFFDVVKEHYEEGDVVWCHDYHVMLLPQYLKEYNSKMKVGWFLHTPFPSSEMYKTLPSRSDLLRSVLTADLVGFHTYDFARHFLNACMCILGVEATSEGIVDQGKVTRVAVFPIGIEPERFINTSELSEVVQYMKKFKNDFGGRKLILGVDRLDTIKGIPQKYQAFEKFLEENAEWRGKVMLLQIAVPTRNGIGEYQKIKDQCHYHVGRINGRFGSISSVPIIHLDCSIDFNQLCALYAITDVLLVTSLRDGMNLVSSEFIACQKAEKGVLILSEFAGAGQSLGAGAILVNPWNIKEVSSAIGEALNMSHEEKERKHKINFQYVKTHSTQQWADDFMKLTLTNILCSKLIEITTSAELGAGLAATLELPEHDVIQQYSKSNNRLLILGFYGTLTQPMKNQERRGDGMNLELHPQLKERLKELCSDPKTTVVVLSRSEKCILDKNFGEYNMWLAAENGMFLRHTSGEWVTRIPEHMNLEWIDGVKHVFKYFTERTPGSYLETSEASLVWNYENADAEFGRAQARDMLQHLWAGPISNASVDVVRGGQSVEVHAVGVTKGSAMERILGEIVHNKSMATPIDYVLCIGCFLGKDEDVYTFFEPELTKKAKSLSSSGSDSPKKVSSTIVDLKGENYFSVAIGQTHTKARYFLDSSDDVVKLIGKLCTHNNA

SEQ ID NO: 39 - DNA, 1239 bp, Arabidopsis thaliana
ataacataaattaagttttttttgtccttttctgcctttacctttccttctactcccgaaaaagcactgactttgctctgtttccttcgttcacacagagaaagagagaaatcttctgagcgaaattctgacaaaagagatgatggaatgggataatcagctacaacccaataaccatcactcttctaatcttcaagggatcgacgttaatggcggctccggcgccggaggaggaatgtacgtgaaggtgatgaccgatgagcagtatgaaactctcaggaaacagattgctatttacggcaccatttgtgagcgtcttgttgagatgcataaaactctcactgctcaacaagatcttgcaggagggagaatgggaggactatatgcagacccaatgatgtcatctttaggtcataagatgacagctagacagaggtggactcctacgccagtccagcttcagattctggaacgtatattcgatcaaggcacgggaacaccgagcaagcagaagatcaaagacataacagaagagctgagccaacacggccagattgctgaacaaaatgtctataactggttccagaaccgacgtgctcgatccaagaggaagcagcatggtggaggttcttctggaaataataatggtgagtctgaggtagagactgaagttgaagcattgaatgagaagagagtagtgaggccagagagtcttcttggtcttccagatggaaatagcaacaataatgggttagggacaacaacagcaacaactactgctcctaggcctgaagatctttgctttcagagccctgagattagctcagaccttcacttgctagatgttctatcaaacccaagggatgagcatcttgttggaaagatgggactggcggaaagttacaacctttatgatcatgttgaagattatggcatgtcaggctgattgaatacaagctgaggaaacttctaattatcagagagatcaatgaaatggatttggtagtcagtcataagcagtattagacttttgtttttcttaaattgtttctttcagggcttattaaagaaacaagtagtttatcttattaatcattttcagagaaacatttacatggattgttgaatcgtcttgtgatgcttgctttgataatttctgcattcagaacgatttttacatccttaaatgaattatactgtaagaaataaaaaaattccaagagaaaaacatttcaattc

SEQ ID NO: 40 - protein, 268 aa, Arabidopsis thaliana
MMEWDNQLQPNNHHSSNLQGIDVNGGSGAGGGMYVKVMTDEQYETLRKQIAIYGTICERLVEMHKTLTAQQDLAGGRMGGLYADPMMSSLGHKMTARQRWTPTPVQLQILERIFDQGTGTPSKQKIKDITEELSQHGQIAEQNVYNWFQNRRARSKRKQHGGGSSGNNNGESEVETEVEALNEKRVVRPESLLGLPDGNSNNNGLGTTTATTTAPRPEDLCFQSPEISSDLHLLDVLSNPRDEHLVGKMGLAESYNLYDHVEDYGMSG

SEQ ID NO: 41 - DNA, 2141 bp, Arabidopsis thaliana
aaggaagaagaaatgttgttgcgtgtgtgttgtccgtcgtctttcttctacctccgaccgcttcatctcttcagttcaactgcgaaagttcctttttgtccctctcttcccagacaatttcgattaagcccttctcgatcttcttcctttcgtcggatggaatcttctccggcttcttcttcgtctccgacgccggtaaccgattcatctgctgattctttagcgaaagatctgcagaatcaaagtctgggagctgttgatgaaggtgttaagattaaaaagaagctcgaagattttaactgggaccattcctttgttaaggaattgcctggtgatcctagaaccgatgttatctcgcgtgaggtattacatgcttgctattcaaaagtttccccatcagtagaagtggatgatcctcagcttgtagcatggtctgtctctgttgcagagctattagatttggatcctaaagaatttgaaaggccagatttccctctcatgttgtccggcgctaaacctttaccaggagcaatgtcttatgctcaatgctatggaggacaccagtttggcatgtgggctggacaactaggggatggacgtgccattactctgggagaagttttgaactccaaaggtgaaagatgggaacttcagcttaaaggtgcgggtagaactccatatagccgttttgctgatggccttgcagtgctccgtagtagcatcagggagttcctttgcagtgaaactatgcattgtcttgggatccctaccacgcgtgccctttgtcttctcaccacaggtcaaaatgtcactcgcgacatgttttatgatggcaatccgaaggaagaacccggcgcaatcgtttgcagggtttctcagtcatttctacgctttgggtcataccaaatacatgcctctagaggaaaagaggatcttgatattgttcgtaagttggcagactatgccattaaacatcatttcccacatatagagagcatggatagaagcgatagcctatctttcaaaaccggtgatgaagatgattcggttgtggatctaacttccaacaagtatgcagcatggatcgttgaaattgctgagcgtacagctaccttagttgcaagatggcaaggtgtaggtttcacccatggtgtgctcaacactgacaatatgagcattttgggtcaaaccattgactatggcccatttggtttcttggatgcttttgatccaagttacaccccaaacacgacagatctcccaggaagaagatactgttttgcaaatcagcctgacatcggcttgtggaatattgctcaattttctaagactctggcggttgctcaactgataaatcaaaaggaggcgaattacgccatggagaggtacggtgataaattcatggatgagtatcaagccataatgtctaagaagcttggtcttaccaagtataacaaggaggtcattagcaaacttttgaacaatatgtctgttgataaagttgattacaccaacttcttccggcttcttgcaaatgtaaaagcaaatcccaacacacccgaaaatgagttattgaaacccttgaaagctgtgctcttggacatcggaaaggagagaaaagaagcatggatcaaatggatgagaagctatatacaagaggtgggtggtagtgaggtatcagatgaagaaagaaaagcaagaatggattcagtgaacccaaagtacattctgaggaactatctgtgccaaagtgcaatagatgcagctgaacaaggcgatttctcagaagtcaacaatttgatccgtctaatgaaacgtccttatgaggaacagccggggatggagaaatatgctcggttgcctcctgcctgggcttacaggccaggcgtctgcatgctttcttgttcctcctagttcttctccttcctgcttttgttttgccatttatagaaaggaagagaaaaaagtaatactctcttatatgtgtattggctgtaatgctttaaagagacaagaaaaactttgctgttttcaggattttgtttttacattgaataaagatttgagtacatatagatttccatgagaagctcaacaaaagaacccaagagccaatatcattttatgcgattaaaaagatt

SEQ ID NO: 42 - protein, 633 aa, Arabidopsis thaliana
MLLRVCCPSSFFYLRPLHLFSSTAKVPFCPSLPRQFRLSPSRSSSFRRMESSPASSSSPTPVTDSSADSLAKDLQNQSLGAVDEGVKIKKKLEDFNWDHSFVKELPGDPRTDVISREVLHACYSKVSPSVEVDDPQLVAWSVSVAELLDLDPKEFERPDFPLMLSGAKPLPGAMSYAQCYGGHQFGMWAGQLGDGRAITLGEVLNSKGERWELQLKGAGRTPYSRFADGLAVLRSSIREFLCSETMHCLGIPTTRALCLLTTGQNVTRDMFYDGNPKEEPGAIVCRVSQSFLRFGSYQIHASRGKEDLDIVRKLADYAIKHHFPHIESMDRSDSLSFKTGDEDDSVVDLTSNKYAAWIVEIAERTATLVARWQGVGFTHGVLNTDNMSILGQTIDYGPFGFLDAFDPSYTPNTTDLPGRRYCFANQPDIGLWNIAQFSKTLAVAQLINQKEANYAMERYGDKFMDEYQAIMSKKLGLTKYNKEVISKLLNNMSVDKVDYTNFFRLLANVKANPNTPENELLKPLKAVLLDIGKERKEAWIKWMRSYIQEVGGSEVSDEERKARMDSVNPKYILRNYLCQSAIDAAEQGDFSEVNNLIRLMKRPYEEQPGMEKYARLPPAWAYRPGVCMLSCSS

SEQ ID NO: 43 - DNA, 1886 bp, Arabidopsis thaliana
tctctcgagtctcgacaactgagaagcaacggaacaccggtgaatcccggaaagaaggtgaatcaaaaaagcaggctgataggtttatatagcaatgtctggtaacaacaacaatccacaaaagcctcaaggctctgcgcctttgccttttgggaatcctgggatggcctctgcatctgttcctggaaaccaaggttttgctcagtctcatatggcagctaactttcaagctcagtttcagttctctcaagctcaggccctagcccatgctcaagcacagtctaaagttcaagcacaactgcaagctcagttacaagctcaaggcatgacgatgaaccaagcacaaggttctccggggattggtggcttgggtccttcttctccttctttgacgactcctggaagtttaaacatgaagagattccagcagaaaccgccgatgcgacctcctggtgctcctgcgagtaacaacactatctccccaatgagaacaatggagttaactcctgctgctcggaaaaagaaacaaaagcttccagaaaagtcattgcaggagcgggtggctgcaatcttgccagagtctgccttatacacacaacttctggagtttgagtctcgggttgatgctgcgttaactagaaagaaagttgacatccaggaagcccttaaaaaccctccctgcatacagaagactcttaggatctacgttttcaactcgtttgctaaccaaaacaacacgatccctgggaatcctaatgctgacccgccaacatggactcttaaaattattggtaggatactggaagatggggtggatcccgaccagccagggtttgttcagaaagcaaacccattgcatcccaaattctcgtctttcttcaaaagggttacagtttccctggatcagaggctgtatcctgagaacccattgatcatatgggagaatgctcgatcacctgctcctcaggaaggctttgagataaagaggaaagggaatcaggagtttgctgctagtatacggttggagatgaactacgtccctgaaaagttcaagctttctactgcattgatggatgttctcgggattgaggttgaaacccgcccaagaatcatcgctgcaatttggcattacgttaaggcgaggaaactgcagaacccaaatgacccctctttcttcaactgtgatgctgcacttcagaaagtttttggagaagaaaagttgaaattcactatggtctctcagaaaatatctcatcacttgtcgcctccaccacctattcacttagaacacaaaatcaagctctcaggaaataatccggccgtatcagcatgttacgatgtgctagtggatgtacccttcccgatccaaagagatctgaacaatttgctagccaacgcagagaagaacaaagagattgaggcttgtgatgaagcaatatgtgcagccataaggaaaatccatgagcataggaggaggcgggcatttttcttggggttcagccaatcgccagttgaattcataaacgccctgatcgaatctcagagcaaggatctaaaggtcgttgcgggagaagccagtcgaaatgctgagagagaacgtcgatcagacttcttcaaccaaccttgggtcgaagatgcagttatacgttacttgaaccggaggccagcagctgggaacgatgggccagggagttggtgagtttcttgacgatacaagtctcttcatctgtttgagcatttttagtagaagatattgttgagattagtctggtttaaaagtgaactagtgtatctgtaatcttgtgtatgttgaaacattactactttatataattagctttgttttgtagcctttgcgttaatggttaagtcatgtttttattagc

SEQ ID NO: 44 - protein, 534 aa, Arabidopsis thaliana
MSGNNNNPQKPQGSAPLPFGNPGMASASVPGNQGFAQSHMAANFQAQFQFSQAQALAHAQAQSKVQAQLQAQLQAQGMTMNQAQGSPGIGGLGPSSPSLTTPGSLNMKRFQQKPPMRPPGAPASNNTISPMRTMELTPAARKKKQKLPEKSLQERVAAILPESALYTQLLEFESRVDAALTRKKVDIQEALKNPPCIQKTLRIYVFNSFANQNNTIPGNPNADPPTWTLKIIGRILEDGVDPDQPGFVQKANPLHPKFSSFFKRVTVSLDQRLYPENPLIIWENARSPAPQEGFEIKRKGNQEFAASIRLEMNYVPEKFKLSTALMDVLGIEVETRPRIIAAIWHYVKARKLQNPNDPSFFNCDAALQKVFGEEKLKFTMVSQKISHHLSPPPPIHLEHKIKLSGNNPAVSACYDVLVDVPFPIQRDLNNLLANAEKNKEIEACDEAICAAIRKIHEHRRRRAFFLGFSQSPVEFINALIESQSKDLKVVAGEASRNAERERRSDFFNQPWVEDAVIRYLNRRPAAGNDGPGSW

SEQ ID NO: 45 - DNA, 1707 bp, Arabidopsis thaliana
gaaaaaccctagaatcccaaaatagaatccctaaaagagaaagaaagcaaaaatggaggacacgaagccaccattgggaggtaacaacaatcctcagcagcagcagcaacaacaacaacttctctatcaacaccaactacaacaacaacagagacaacaacaaatgcttctattgcagcaattgcaaaaacaacaacagcaacaagcagcaatgtctagattcccgtcgaacatcgacgtgcatctccggccaccggggttgattcagaaccgacccattaatcctccgcctcagcagaatcctacccctaaccctaatttgggacagcagacaccgaattttcaacagcagcagcagcagaatgtatcgagtcagcagatgatgcagcaacaacaacaacagcagcagcagcagaaattgatgaggccattgaatcacatcgagcttcaatgcgcttatcaggacgcttggcgtgtttgtcaccccaattttaaacaacccttctcttctctcgaagatgcttgcgagagattattaccttatcatgtcgtagcagattacgaagcagaagaggatgatagaatccttgattcagacccaacaggccaggccttgtcccgctctcaacaatgggataacaacattgctgcgaaagttgctgaattcacggcaacgtttgagaagcaagcactagcttttaacataataactcgaaagagagctatgggagaattcagatctgaggaaaggttgatggtagaacaagctttgctacaagatgaaaggaaagcgttgattgaactgaaagcagaaatggatagggagaaggctggccgggaggctcaggaggctaagctgcggatggcggctttagctcaagctggacagtctcaatctcatgctgagataatggctcgtaacccattaagggctaatgcggttggaaatcagggcagcaatattcagcttagccacgagatgggagaacagggacgtaacatgaaccctgatgagatgatgaatggatggggaaacaacagtcagagagaggacaaggaaccttcagaagatttcttgaatgatgaggagaatgagaatggagagacaggggaacaagaaaactggcgtgaagcaggagaatttgatttgaatagccggtaaatgaccaaggtgaagactatttgcagtctcatgtattagaaactggaaaggaaattacagttgctcttgatatcactccaatttctatagtttcaagctgctatatatgccaggttcaggtcaagtatatgggtatctgatagtcagactcaaagcctaatgatactcttgctctccgctatctgaattaccaatgatggttccaagtaagcatttcttgtatctgtttgatgttttgtagcataagttagatgtgtgcattacatgttgatgattagtgtcttcatgatacatggagatggagaggctggttacctagtaaccgaatcttgtagaaggtgtaagagatccagatagtaaagcttagtagctaaaatagattatcatatgtaagttactattacagaattgtattggttatgtattggccatgtatggaatgattgattgtgatatgtgaaaagattgtaatagttacacaaatttaatcctcaggtggaggatttttgcatactttctcatcaaattggtctaattttgtttgt

SEQ ID NO: 46 - protein, 369 aa, Arabidopsis thaliana
MEDTKPPLGGNNNPQQQQQQQQLLYQHQLQQQQRQQQMLLLQQLQKQQQQQAAMSRFPSNIDVHLRPPGLIQNRPINPPPQQNPTPNPNLGQQTPNFQQQQQQNVSSQQMMQQQQQQQQQQKLMRPLNHIELQCAYQDAWRVCHPNFKQPFSSLEDACERLLPYHVVADYEAEEDDRILDSDPTGQALSRSQQWDNNIAAKVAEFTATFEKQALAFNIITRKRAMGEFRSEERLMVEQALLQDERKALIELKAEMDREKAGREAQEAKLRMAALAQAGQSQSHAEIMARNPLRANAVGNQGSNIQLSHEMGEQGRNMNPDEMMNGWGNNSQREDKEPSEDFLNDEENENGETGEQENWREAGEFDLNSR

SEQ ID NO: 47 - DNA, 1789 bp, Arabidopsis thaliana
atccgccaaaaacccttcccggaactagaaccctaacttctctgcaagtctctctgttctagtcacaattcactgaattaaagtttgaaaacccatgatgaaatgttgaacctttccaatttccatggcgatttcaagtgtgggttttgcttgcagatccttttcccctgttcgtactctccagtctcactgcttatggaagatacggttcaacactgttgctgctgcaattgagacaatggatgagtcagatggttttgccacggacagtgatcgtcaagacaaggtttctgatgaaccaagggatcgtgagtggaaacaactgaattcgaaagatcttggactaagcagctcaatgattgcaaaatccacaagaaaagtgcttaatggccttaaaagcaaaggacatgatgtttaccttgtgggaggctgtgtacgagatcttattctgaagcggacaccgaaagacttcgatatacttacctctgcagaacttagagaggtggttcgaactttcccaagatgtgaaattgttggaagaaggtttcctatatgtcacgtacacattggagatgatttaatagaggtttcgagttttagtacctctgcacagaattcttcgagaaatacgagaactgaatgcaaagaatcgagtggctcagatggtgatgaggactgtatccgtttgaataactgtttgcagcgtgatttcacaattaacgggttgatgtttgatccatatgccaaagtcgtatatgactatttgggaggaatggaagatattagaaaagctaaagttcgaacagtgattcacgctggcacatcttttcaccaggactgtgctcggattcttcgtgcaataagaattgctgcgcgtttaggtttcagaatgtccaaagaaaccgctcattttattaagaacctttccttactagtacaaagacttgacaagggaaggatcttgatggaaatgaattacatgttagcttatggatcagcagaggcttctttgagattgctgtggaaatttgggatacttgaaattcttctaccaattcaggcagcatatcttgcacgcagtggtttcaggagacgtgacaaaaggactaacatgcttctgtctctctttgctaacttggataaattgttagcacctgataggccttgtcacagcagcttatggatagcaatcttggcgtttcacaaagcacttgctgataaacctcgaagtcctatagtggttgctgcgtttagccttgctgttcacaactgtggagatattctagaagctgtggaaatcacaaagaagatcactaggccacacgataaaagcttcttcgagctagtagagcccgaggagaatctcgacttccaaaccctgttggacgaggtcatggatcttgatgcttctatcgaagatgccttaaaccagatgactgatgcgtattttatatcgaaagctatgtcagcttaccctcaagcaccatattccgatttggtctttataccgttgcagctgtaccttagagcaggcagaatcttcgattgtgtgaaaaacgaagagacacgaattggatttgaggccaagcaaggaagcaagatcgagtatggttcgttaaattcaggatattttcccgaaattcggcatgtatttgcgagggttgtgttcgatactgtttttccattaaacctatctcaagaattgtaaaaatctcatctttgagccctttcaaagcttgggacactaggtggggaaagtatccacaactatccaggctttagttaacag

SEQ ID NO: 48 - protein, 527 aa, Arabidopsis thaliana
MAISSVGFACRSFSPVRTLQSHCLWKIRFNTVAAAIETMDESDGFATDSDRQDKVSDEPRDREWKQLNSKDLGLSSSMIAKSTRKVLNGLKSKGHDVYLVGGCVRDLILKRTPKDFDILTSAELREVVRTFPRCEIVGRRFPICHVHIGDDLIEVSSFSTSAQNSSRNTRTECKESSGSDGDEDCIRLNNCLQRDFTINGLMFDPYAKVVYDYLGGMEDIRKAKVRTVIHAGTSFHQDCARILRAIRIAARLGFRMSKETAHFIKNLSLLVQRLDKGRILMEMNYMLAYGSAEASLRLLWKFGILEILLPIQAAYLARSGFRRRDKRTNMLLSLFANLDKLLAPDRPCHSSLWIAILAFHKALADKPRSPIVVAAFSLAVHNCGDILEAVEITKKITRPHDKSFFELVEPEENLDFQTLLDEVMDLDASIEDALNQMTDAYFISKAMSAYPQAPYSDLVFIPLQLYLRAGRIFDCVKNEETRIGFEAKQGSKIEYGSLNSGYFPEIRHVFARVVFDTVFPLNLSQEL

SEQ ID NO: 49 - DNA, 3811 bp, Arabidopsis thaliana
gctggaactgatttttttcttctctctctctctctctcttccttctgggcttctagggtttgtcctctccagtccccgatttccgctttatccgatcggccgccgccgagattctagataaacctatggcaatggaggttacgcagttgctcattaatgctcagtcgattgatggaactgtacgtaagcacgcggaagaaagtcttaagcagtttcaggagcaaaaccttgcgggtttcttgttgtcgcttgctggagagcttgcgaatgatgagaagccagtagatagcaggaaattagctggtttagtccttaaaaatgctcttgatgctaaggaacaacacaggaagtatgagcttgttcagagatggttggctctagacatgtcaacaaagtcgcagatcagagctttcttgttgaagacactgtcggcacctgtgcctgatgttcgttcgactgcatctcaggtcattgctaaggttgcaggtattgagttaccacagaagcagtggcctgagctcatagtgtctcttctctcaaatattcaccagttacctgctcatgtcaagcaagccactttggagactcttggatacctatgtgaagaagtgtcacctgatgttgttgaacaggagcatgtaaataagatactcacagctgttgttcagggtatgaatgctgctgaaggtaatactgatgttagacttgctgcaacccgtgctttatacatggctctcggattcgcccaagcaaatttcaacaacgacatggagcgtgattatatcatgagagttgtgtgtgaagcaaccctgtcccctgaggtgaaaattaggcaggcagcttttgagtgtttggtatctatcgcttccacatactatgagaagttggcgcattacatgcaagatatattcaacatcacagctaaggctgtaagagaagatgacgagtctgttgctctacaggcaattgagttctggagttctatttgtgacgaagagattgacatcttagaagaatatggtggtgagttcgctggggattctgatgttccatgcttttattttactaagcaggctctccctggtcttgtgcctctactgctggagactcttctgaagcaagaagaagatcaagatttggatgaaggggcttggaatattgcaatggcaggtgggacatgcctcggtttggttgctagggcagttggagatgacattgttccacatgtcatgccgtttattgaagagaaaatatcaaagcctgattggagagagcgagaagctgcaacttatgcttttggttccattttggaaggcccttctgccgataagttgatggcaattgttaacgcagcgttaacatttatgctcaatgctctaacaaatgacccaagcaaccatgtgaaagacacaaccgcatggacccttggtcggatatttgagttccttcatggttcaacaatcgagacacctattattaatcaggcaaactgccagcagataatcacagtactcatccagagcatgaatgatgcgcctaatgttgccgagaaggcttgtggggctctgtacttccttgctcaaggctatgaggatatcggtcccagttctccgttaacacccttcttccaggaaattattaagtcacttttagctgttgcacacagagaggatgcaactgaatcacgcttgcggactgcagcatatgaggcattgaatgaagttgtcaggtgttcaactgatgaaacgtctaccatggttctgcaattagtaccagtgataatgatggagcttcacaatactttggaaggggaaaagctttcattggatgagagggagaaacaaaacgagttgcagggacttctatgtggatgcttgcaggtcatcatacagaaattaggatctgaaccaaccaagtctaagttcatggagtatgcagaccaaatgatgggacttttcctgagggtgtttggttgtagaagtgcaactgcacatgaggaagccatgcttgccattggtgctcttgcttatgcagcaggtcccaattttgccaaatacatgcctgagttttataagtacttggagatgggtcttcaaaactttgaagaataccaagtgtgtgctgttactgttggtgttgttggggatgtctgcagagcattggaggacaagattttaccttattgcgatgggattatgacacagcttctgaaagatttgtcgagcaaccaattgcaccgatcagtgaagccaccgatattctcctgttttggtgacatagcacttgctatcggtgaggattttgataagtactggaggtattcaatgccgatgcttcagagtgccgcagagttatctgctcactcggctggagctgatgatgaaatgacggagtacacaaactcattgagaaacggaatccttgaggcttattcaggcatatttcaaggtttcaagaactccgccaaaacccagctcctgattcctttcgcaccccatatcctccagtttttggacagtatatacatggagaaagacatggacgaggtggtgatgaagacagcgattggggtcttaggagatttagcagatacactagggagtcatgtgggtggtttgatacaacagtcagtgtcaagtaaagagttcttaaacgaatgtttgtcttctgaagaccacacaattaaagaagcagccgaatgggcgaagcatgccataacccgtgccatatctgtttgaaggctcttcttttgcctataagaaagaaaattccttttgctttttagtaaagtctgcatgcatctctgggtgggttgagtcggtcggggggaggggtagagctgcaacatccgagtcacatcagcatcatcagcatcagtttcatttgcatcatcagcataactggggtcagtcagggaatcgttgagtcgtggatgtggggaatgatgagttttggggtaaataatgaaactggaagagtcacgggtgaaagtttcccgggtaaggttaaatccccgggagtagaaagaggaggaagtgagtcatggtcgttttctggtgggttttgggacaaagttataccaaaaaaaaaaaggtttcatggaacatctcataatacattcttgttttttcttttctctcatatgttcttcaaccccttgaggagggagaggtctcaggtttttatcaagtgggggcattattagaggacaatcccttgattttttcttttgttttcttttattatttggttagttgcagtctttgcatcatcattttgtcttttgggggggtttgtatgtttgattaaaagcattattcacatttttatttttatataaagaagtttcacatgtctgtctatcttctctttgctatgatgcagtttagggggttttgcatatatacttgtgttttgtttgcaatcaagtttcaaatgtcacatacaggaacatttttattatatggtgtcatgtcttagggtcttaaagaggtccacatctattcattttactatggaactgtttacaatcgtttagaatccattatttgatttggctcgaactatatgggaaagggcacatgttaataggagaaaacgtcctgccttactctgcttccaaagagtcaagttaagagatcgaagaacatttcacattcacgctgtttatggaaacctcaattttgattgtatgtgttgcttttttttggttttccaaacgccaaatgcaactgataccgaacctatattttgaaaaatgttttcatgtgtatttgaaacattctagaccattcaagttatggtttaaatt

SEQ ID NO: 50 - protein, 870 aa, Arabidopsis thaliana
MAMEVTQLLINAQSIDGTVRKHAEESLKQFQEQNLAGFLLSLAGELANDEKPVDSRKLAGLVLKNALDAKEQHRKYELVQRWLALDMSTKSQIRAFLLKTLSAPVPDVRSTASQVIAKVAGIELPQKQWPELIVSLLSNIHQLPAHVKQATLETLGYLCEEVSPDVVEQEHVNKILTAVVQGMNAAEGNTDVRLAATRALYMALGFAQANFNNDMERDYIMRVVCEATLSPEVKIRQAAFECLVSIASTYYEKLAHYMQDIFNITAKAVREDDESVALQAIEFWSSICDEEIDILEEYGGEFAGDSDVPCFYFTKQALPGLVPLLLETLLKQEEDQDLDEGAWNIAMAGGTCLGLVARAVGDDIVPHVMPFIEEKISKPDWREREAATYAFGSILEGPSADKLMAIVNAALTFMLNALTNDPSNHVKDTTAWTLGRIFEFLHGSTIETPIINQANCQQIITVLIQSMNDAPNVAEKACGALYFLAQGYEDIGPSSPLTPFFQEIIKSLLAVAHREDATESRLRTAAYEALNEVVRCSTDETSTMVLQLVPVIMMELHNTLEGEKLSLDEREKQNELQGLLCGCLQVIIQKLGSEPTKSKFMEYADQMMGLFLRVFGCRSATAHEEAMLAIGALAYAAGPNFAKYMPEFYKYLEMGLQNFEEYQVCAVTVGVVGDVCRALEDKILPYCDGIMTQLLKDLSSNQLHRSVKPPIFSCFGDIALAIGEDFDKYWRYSMPMLQSAAELSAHSAGADDEMTEYTNSLRNGILEAYSGIFQGFKNSAKTQLLIPFAPHILQFLDSIYMEKDMDEVVMKTAIGVLGDLADTLGSHVGGLIQQSVSSKEFLNECLSSEDHTIKEAAEWAKHAITRAISV

SEQ ID NO: 51 - DNA, 860 bp, Arabidopsis thaliana
tcaaaacgcagcgttttctagctgatagataaagcaactattttcccggctagtgagaagagagagaagagaatggaaggtgtaggatcgagattgagccggacgtcatcgagatacagtggtccggcggcgacggcggtgttcagtggccgtgtaaggaaatggaagaagaagtgggtacgtgtctcaacctcatccgtcggtgttttcagagcatctaaatccaacggtcgtaacaacagcaacaacagtaactcaccacaccatctacttctccataagtggactccacttacctcagcgacggttactgcctccgacgctaatggttccggtgagacagaggagtcgcctaagcgaagattcagatacgctccaattgcgatgcttgagcatagagaaaaagtgatttctaaggattctgaaattgaagagactgaagaattcgacactgaatctccattacctaaagctgttgagctagacatgaacctaacagactcagaccaaactaaggaagcaaaaactggtaatttgaatctgggactgtgtctgaattctgaagggactgaagaatgaagagaatcatattgatttgggatgagcaactataaaatgtgttcagctgtgatgatgtcttatattgtatcttatgctaggcggttattccactttgacgtcttctagatctctatgtagtgtgtttgtaagttaggaagaagttatataaatgtaagatttgaagcttttaccaagagtttggctttggcttatgaatttgtgtaaaagttacagaaccagggcttccctggaagtacagagcatagtcatgctaccttatgggaatcttgttcctccaa

SEQ ID NO: 52 - protein, 168 aa, Arabidopsis thaliana
MEGVGSRLSRTSSRYSGPAATAVFSGRVRKWKKKWVRVSTSSVGVFRASKSNGRNNSNNSNSPHHLLLHKWTPLTSATVTASDANGSGETEESPKRRFRYAPIAMLEHREKVISKDSEIEETEEFDTESPLPKAVELDMNLTDSDQTKEAKTGNLNLGLCLNSEGTEE

SEQ ID NO: 53 - DNA, 633 bp, Arabidopsis thaliana
atgcaacagcacctgatgcagatgcagcccatgatggctggttactaccccagcaatgttacctctgatcatatccaacagtacttggacgaaaacaaatcgttgattctgaagattgttgagtctcaaaactctggaaagcttagcgaatgcgccgagaatcaagcaaggcttcaacgcaacctaatgtacctagctgcaatagcagattctcagcctcagccaccaagtgtgcatagccagtatggatctgctggtggtgggatgattcagggagaaggagggtcacactatttgcagcagcaacaagcgactcaacagcaacagatgactcagcagtctctaatggcggctcgatcttcaatgttgtatgctcagcaacagcggcagcagcagccttacgcgacgcttcagcatcagcaatcgcaccatagccagcttggaatgagctcgagcagcggaggaggaggaagcagtggtctccatatccttcagggagaggctggtgggtttcatgattttggccgtgggaagccggaaatgggaagtggtggtggcggtgaaggcagaggaggaagttcaggggatggtggagaaaccctttacttgaaatcatcagatgatgggaattga

SEQ ID NO: 54 - protein, 210 aa, Arabidopsis thaliana
MQQHLMQMQPMMAGYYPSNVTSDHIQQYLDENKSLILKIVESQNSGKLSECAENQARLQRNLMYLAAIADSQPQPPSVHSQYGSAGGGMIQGEGGSHYLQQQQATQQQQMTQQSLMAARSSMLYAQQQRQQQPYATLQHQQSHHSQLGMSSSSGGGGSSGLHILQGEAGGFHDFGRGKPEMGSGGGGEGRGGSSGDGGETLYLKSSDDGN

SEQ ID NO: 55 - DNA, 588 bp, Arabidopsis thaliana
atgcagcagcagcagtctccgcaaatgtttccgatggttccgtcgattccccctgctaacaacatcactaccgaacagatccaaaagtaccttgatgagaacaagaagctgattatggccatcatggaaaaccagaatctcggtaaacttgctgagtgcgcccagtaccaagctcttctccagaagaacttgatgtatcttgctgcaattgctgatgctcaacccccaccacctacgccaggaccttcaccatctacagctgtcgctgcccagatggcaacaccgcattctgggatgcaaccacctagctacttcatgcaacacccacaagcatcccctgcagggattttcgctccaaggggtcctttacagtttggtagcccactccagtttcaggatccgcaacagcagcagcagatacatcagcaagctatgcaaggacacatggggattagaccaatgggtatgaccaacaacgggatgcagcatgcgatgcaacaaccagaaaccggtcttggaggaaacgtggggcttagaggaggaaagcaagatggagcagatggacaaggaaaagatgatggcaagtga

SEQ ID NO: 56 - protein, 195 aa, Arabidopsis thaliana
MQQQQSPQMFPMVPSIPPANNITTEQIQKYLDENKKLIMAIMENQNLGKLAECAQYQALLQKNLMYLAAIADAQPPPPTPGPSPSTAVAAQMATPHSGMQPPSYFMQHPQASPAGIFAPRGPLQFGSPLQFQDPQQQQQIHQQAMQGHMGIRPMGMTNNGMQHAMQQPETGLGGNVGLRGGKQDGADGQGKDDGK

SEQ ID NO: 57 - DNA, 672 bp, Arabidopsis thaliana
atgcagcaatctccacagatgattccgatggttcttccttcatttccgcccaccaataatatcaccaccgaacagatccaaaagtatcttgatgagaacaagaagctgataatggcgatcttggaaaatcagaacctcggtaaacttgcagaatgtgctcagtatcaagctcttctccagaagaatttgatgtatctcgctgcaattgcggatgctcaacctcagccaccagcagctacactaacatcaggagccatgactccccaagcaatggctcctaatccgtcatcaatgcagccaccaccaagctacttcatgcagcaacatcaagctgtgggaatggctcaacaaatacctcctgggattttccctcctagaggtccattgcaatttggtagcccgcatcagtttctggatccgcagcaacagttacatcaacaagctatgcaagggcacatggggattagaccaatgggtttgaataataacaacggactgcaacatcaaatgcaccaccatgaaactgctcttgccgcaaacaatgcgggtcctaacgatgctagtggaggaggtaaaccggatgggaccaatatgagccagagtggagctgatgggcaaggtggctcagccgctagacatggcggtggtgatgcaaaaactgaaggaaaatga

SEQ ID NO: 58 - protein, 223 aa, Arabidopsis thaliana
MQQSPQMIPMVLPSFPPTNNITTEQIQKYLDENKKLIMAILENQNLGKLAECAQYQALLQKNLMYLAAIADAQPQPPAATLTSGAMTPQAMAPNPSSMQPPPSYFMQQHQAVGMAQQIPPGIFPPRGPLQFGSPHQFLDPQQQLHQQAMQGHMGIRPMGLNNNNGLQHQMHHHETALAANNAGPNDASGGGKPDGTNMSQSGADGQGGSAARHGGGDAKTEGK

SEQ ID NO: 59 - DNA, 627 bp, Allium cepa
atgcagcagccgcagccagcgatgggaaccatgggctcggtgccacctactagcatcaccaccgaacagattcaaaggtacttggatgagaacaaacagttaatattggcaattttggataatcaaaatttaggaagactgaatgagtgtgctcaatatcaagctcagcttcaaaagaatctgctttacctggcagcaatagctgatgctcagcctcagtctcctgcggtgcgtctgcagatgatgcctcaaggtgcagctgccacgcctcaagctggaaaccaatttatgcagcagcagagccctaatttccctcccaaaacaggaatgcaatttactcctcaacaagtacaagaattgcagcagcaacagctacaacatcagccacatatgatgcctccatttcaaggtcaaatgggtatgagacctatgaatggaatgcaggcagcaatgcatgcagattcatctcttgcttataacactaacaataagcaagatgcaggaaacgcagcttatgaaaatactgctgccaacacagatggttccattcaaaagaaaacagcaaatgatgatttagacccttctgcagcaaaccctagaaggtctgaagatgccaaatcatcatga

SEQ ID NO: 60 - protein, 208 aa, Allium cepa
MQQPQPAMGTMGSVPPTSITTEQIQRYLDENKQLILAILDNQNLGRLNECAQYQAQLQKNLLYLAAIADAQPQSPAVRLQMMPQGAAATPQAGNQFMQQQSPNFPPKTGMQFTPQQVQELQQQQLQHQPHMMPPFQGQMGMRPMNGMQAAMHADSSLAYNTNNKQDAGNAAYENTAANTDGSIQKKTANDDLDPSAANPRRSEDAKSS

SEQ ID NO: 61 - DNA, 633 bp, Aquilegia formosa x Aquilegia pubescens
atgcaacacatgcagatgcagcccatgatgccaccttatagtgccaacagcgtcactactgatcatatccaacagtacttggatgaaaataaggcgttgattctgaagatacttgagaaccaaaattcgggaaaagttagtgaatgtgcagagaaccaagcaagacttcaacgaaatcttatgtatctggctgcaattgctgattctcaaccacagcctcccaatatgcatgctcagtactctaatgcgggtataccacctggtgcacattacctacaacaccaacaggcccaacagatgacacaacagtcgctcatggctgctcgatcaaatatgctgtatgctcagccaatcacaggaatgcagcaacagcaagcaatgcatagccagcttggcatgagctctggtggtaacagtggactccacatgatgcacaatgagggcagcatgggaggtagtggggcacttggaagctattctgattatggccgtggcagtggtggtggagtaactatcgctagcaaacaagatggtggaagtggttctggtgaaggacgaggtggaaactctggaggccaaagtgcagatggaggtgaatctctttacctgaaaaacagtgacgaagggaactaa

SEQ ID NO: 62 - protein, 210 aa, Aquilegia formosa x Aquilegia pubescens
MQHMQMQPMMPPYSANSVTTDHIQQYLDENKALILKILENQNSGKVSECAENQARLQRNLMYLAAIADSQPQPPNMHAQYSNAGIPPGAHYLQHQQAQQMTQQSLMAARSNMLYAQPITGMQQQQAMHSQLGMSSGGNSGLHMMHNEGSMGGSGALGSYSDYGRGSGGGVTIASKQDGGSGSGEGRGGNSGGQSADGGESLYLKNSDEGN

SEQ ID NO: 63 - DNA, 668 bp, Aquilegia formosa x Aquilegia pubescens
atgcagcaacctccgccaatgatgaacatggtcccaccatttcctcctactaacattacaactgaacagattcaaaagtatctggatgagaacaaaacactgattttggcaatattagacaatcagaatcttggaaaattagccgaatgtgctcagtaccaagctcagcttcagaagaatctgatgtatcttgctgcaattgctgatgcccaaccgcaagctcctgcagttccctctcagatgccaacacatccggcaatgcaacagggaggacattatatgcaacatccgcaagcagctatgcctcaacagcccagtggttttccacccaagtcccccatgcaatttaaccctcagcaaatgcaagagcagcaacggctgcagctacaacagcaacaccaacaggcacttcaaggtcatatgggcattcgacctggagtcaacaatggtttgcaaatgcatggggatggtaatgttggaggcagcagcagcggtggcccatcatcaaccggtaacttacctgatttctcacgcagtggtgccggtcctggtgctggttctagttcattggatgcacgggaaggtaagcaagatggagtggaagcgggtgctggtgatggtcaaggcaattcagcagccagaaataatggttcaaatggggatacatg

SEQ ID NO: 64 - protein, 222 aa, Aquilegia formosa x Aquilegia pubescens
MQQPPPMMNMVPPFPPTNITTEQIQKYLDENKTLILAILDNQNLGKLAECAQYQAQLQKNLMYLAAIADAQPQAPAVPSQMPTHPAMQQGGHYMQHPQAAMPQQPSGFPPKSPMQFNPQQMQEQQRLQLQQQHQQALQGHMGIRPGVNNGLQMHGDGNVGGSSSGGPSSTGNLPDFSRSGAGPGAGSSSLDAREGKQDGVEAGAGDGQGNSAARNNGSNGDT

SEQ ID NO: 65 - DNA, 633 bp, Aspergillus officinalis
atgcagcagcacctgatgcagatgcagcccatgatggcaacctacggttcaccgaatcaggtcaccaccgatatcattcagcagtatctggacgagaacaagcagttgattctggctattcttgaaaaccaaaattcaggaaaagctgatgaatgtgctgagaatcaggctaagcttcagaggaatctgatgtatcttgcagccattgcggatagccagccccaagttcctaccattgctcagtatcctcccaacgctgttgctgctatgcaatcgagtgctcgctacatgcaacaacaccaagcagctcaacagatgacccctcaatctctcatggctgctcgctcctcaatgctctactcacagtccccaatgtctgcactccagcagcaacagcagcaagcagcaatgcatagccagctcgccatgagctccggaggcaacaacagcagcaccggaggattcaccattcttcatggtgaagctagcataggaggcaatggctcaatgaattctggtggagtctttggagattttggacggagcagcggtgggaagcaagagactgggagcgaagggcacgggacagagactcctatgtacctgaaaggctctgaagaagaaggaaactga

SEQ ID NO: 66 - protein, 210 aa, Aspergillus officinalis
MQQHLMQMQPMMATYGSPNQVTTDIIQQYLDENKQLILAILENQNSGKADECAENQAKLQRNLMYLAAIADSQPQVPTIAQYPPNAVAAMQSSARYMQQHQAAQQMTPQSLMAARSSMLYSQSPMSALQQQQQQAAMHSQLAMSSGGNNSSTGGFTILHGEASIGGNGSMNSGGVFGDFGRSSGGKQETGSEGHGTETPMYLKGSEEEGN

SEQ ID NO: 67 - DNA, 558 bp, Beta vulgaris
atgcagcaacaatcacctcaaatgttcaaccacccaccttcacaacccacaattactaccgaacaaattcaaaagtatcttgatgagaacaagcagttgattttggcaattatggaaagtcaaaactctggaaaaatgaatgaatgtgcccagtatcaagctcagctgcagaaaaacttgatgtacttggctgcaattgctgatgctcagccaccagcacctacagggccctctcagtctcagccgcagaattctcagatgcctatgcaatcgaccattccacaaggcccttttatgccgcctcctaaacctgcagttaccccacagcaaacaggtcccagattgccctttgctctacagtcgtttgatcagcagtcaccccatatgcaaatgcaataccaacagtccatggcaggctccatgggtatgagaatgggtgggaataatgttttacgcccttccatccagaccggatatggagctccaacacattttatggatgcacggaacagacaagatggttctgacgcaagtctcggtgatgatcatggaaagtaa

SEQ ID NO: 68 - protein, 185 aa, Beta vulgaris
MQQQSPQMFNHPPSQPTITTEQIQKYLDENKQLILAIMESQNSGKMNECAQYQAQLQKNLMYLAAIADAQPPAPTGPSQSQPQNSQMPMQSTIPQGPFMPPPKPAVTPQQTGPRLPFALQSFDQQSPHMQMQYQQSMAGSMGMRMGGNNVLRPSIQTGYGAPTHFMDARNRQDGSDASLGDDHGK

SEQ ID NO: 69 - DNA, 615 bp, Brachypodium distachyon
atgcagcaggcgatgtccatgtccccggggtcggccggcgcggtgccgcctccggccggcatcaccacagagcagatccaaaagtatttggatgaaaataagcaacttattttggccatcctggaaaatcagaacctaggaaagttgactgaatgtgctcagtatcaagctcaacttcagaagaatctcttgtatctggctgccattgcggatgcccaaccaccacagaaccctggaagtcgcccccagatggtgcagcctggtggtatgccaggtgcagggcattacatgtcgcaagtaccaatgttccctccaagaacccctttaaccccacaacagatgcaagagcaacagcaccagcagcttcagcagcagcaagcacaggctcttgctttccccagccagatggtcatgagaccaggtactgtgaacggcatgcagcctatgcaagctgatctccaagcagcagcagcagcacctggcctggcagacagccgaggaagtaagcaggacgcagcggtagctggggccatctcggaaccttctggcaccgagagtcacaagagtacaggagcggatcatgaggcaggtggcgatgtagctgagcaatcctaa

SEQ ID NO: 70 - protein, 204 aa, Brachypodium distachyon
MQQAMSMSPGSAGAVPPPAGITTEQIQKYLDENKQLILAILENQNLGKLTECAQYQAQLQKNLLYLAAIADAQPPQNPGSRPQMVQPGGMPGAGHYMSQVPMFPPRTPLTPQQMQEQQHQQLQQQQAQALAFPSQMVMRPGTVNGMQPMQADLQAAAAAPGLADSRGSKQDAAVAGAISEPSGTESHKSTGADHEAGGDVAEQS

SEQ ID NO: 71 - DNA, 591 bp, Brassica napus
atgcagcccatgatggctggttactaccccagcaatgtcacctctgatcatatccagcagtacttggatgagaacaagtctttgattctgaagatagttgagtctcaaaactcaggaaagctcagcgagtgtgccgagaatcaggcaaggcttcaacgcaacctcatgtacttggctgcaatagcagattctcagcctcaacctccaagcgtgcatagccagtatggatctgctggtggtgggttgattcagggagaaggagcgtcacactatttgcagcagcaacaggcgactcaacagcagcagatgactcagcagtctcttatggcagctcgttcttcaatgatgtatcagcagcagcaacagccttatgcaacgcttcagcatcagcagttgcaccatagccagcttgggatgagctctagcagcggaggaggaagcagtggtctccatatccttcagggagaggctggtgggtttcatgaatttggccgtgggaagccggagatgggaagtggtgaaggcaggggtggaagctcaggggatggtggagaaacactctacttgaagtcatcagatgatgggaactga

SEQ ID NO: 72 - protein, 203 aa, Brassica napus
MQQHLMQMQPMMAGYYPSNVTSDHIQQYLDENKSLILKIVESQNSGKLSECAENQARLQRNLMYLAAIADSQPQPPSVHSQYGSAGGGLIQGEGASHYLQQQQATQQQQMTQQSLMAARSSMMYQQQQQPYATLQHQQLHHSQLGMSSSSGGGSSGLHILQGEAGGFHEFGRGKPEMGSGEGRGGSSGDGGETLYLKSSDDGN

SEQ ID NO: 73 - DNA, 636 bp, Brassica napus
atgcagcagcagcagcagcagcagcagcagcctccgcaaatgtttccgatggctccttcgatgccgccaactaacatcaccaccgaacagatccaaaagtaccttgaggagaacaagaagctgataatggcaatcatggaaaatcagaatcttggcaagcttgcagagtgtgcacagtaccaagctcttctccagaagaacttaatgtacctcgctgctattgctgatgctcaacctcctccatctaccgctggagctacaccaccaccagctatggcttcccagatgggggcaccgcatcctgggatgcaaccgccgagctactttatgcaacacccacaagcttcagggatggctcaacaagcaccacccgctggtatcttccctccgagaggtcctttgcagtttggtagcccacaccagcttcaggatccgcaacagcagcatatgcatcaacaggctatgcaaggacacatggggatgcgaccaatgggtatcaacaacaacaatgggatgcagcatcagatgcagcaacaacaaccagaaacctctcttggaggaagcgctgcaaacgtggggcttagaggtggaaagcaagatggagcagatggacaaggaaaagatgatggcaaatga

SEQ ID NO: 74 - protein, 203 aa, Brassica napus; identical to SEQ ID NO: 72

SEQ ID NO: 75 - DNA, 552 bp, Chlamydomonas reinhardtii
atggcggcagcctcaaaacctccaccgatgacgaccgacaaaatacaagacatgctggaggagaatttcaagttcattaaagccattgccgagcagcaaaacttgggccgggttcaagaagtgcaccagtaccagcagaagctgcaggagaacctgatgctgctggccgcagtggcagacacctactccaactcagcagcagcagcacagccggggggagaagctggcgcagccgcacccgcggcggccacggcacgaccacccaccgcgcctggagcgccgctgggggcaccgggagcaccgccgcccgcggctccggctctcacaccacagcagatccacgcggccgtgcagcaggcactggccatgaagcagcagcagcagcagcagcagcagcaacagccgcagcagccgcagcagtcggcggtggcgcagtaccagcaaccgcctcaagcggggctgcccataccgggcgggatggcgcccgggcaaggcgcgccgccaggcttcacgctaccggcgccaccgcccctgaacctagccgggcagtag

SEQ ID NO: 76 - protein, 183 aa, Chlamydomonas reinhardtii
MAAASKPPPMTTDKIQDMLEENFKFIKAIAEQQNLGRVQEVHQYQQKLQENLMLLAAVADTYSNSAAAAQPGGEAGAAAPAAATARPPTAPGAPLGAPGAPPPAAPALTPQQIHAAVQQALAMKQQQQQQQQQQPQQPQQSAVAQYQQPPQAGLPIPGGMAPGQGAPPGFTLPAPPPLNLAGQ

SEQ ID NO: 77 - DNA, 663 bp, Citrus sinensis
atgcaacagcacctgatgcagatgcagcccatgatggcagcttattatcccaacaacgtcactactgaccacattcaacagtatctagatgagaacaaatcattgattttgaagattgttgagagccagaattcagggaaactgagcgagtgtgcagagaaccaggcaagattgcagcggaatctcatgtacctggctgctattgctgatgctcaaccccaaccacctagcgttcatgcccagttctcttctggtggcattatgcagccaggagctcactatatgcaacaccagcaatctcagccaatgacaccacagtcacttatggctgcacgctcatccatggtgtactctcaacagcaattttcagtgcttcagcaacagcaagccttgcatggtcagcttggcatgagctctggtggtagctcaggacttcacatgctgcaaagtgagggtagtactgcaggaggtagtggttcacttgggggtgggggattccctgattttggccgtggctcatctggtgaaggcttgcactcaaggggaatggggagcaagcatgatataggcagttctggatctgctgaaggacgaggagggagctcaggaagccaagatggaggcgaaactctctacttgaaaggggctgatgatggaaattaa

SEQ ID NO: 78 - protein, 219 aa, Citrus sinensis
MQQHLMQMQPMMAAYYPNNVTTDHIQQYLDENKSLILKIVESQNSGKLSECAENQARLQRNLMYLAAIADAQPQPPSVHAQFSSGGIMQPGAHYMQHQQSQPMTPQSLMAARSSMVYSQQQFSVLQQQQALHGQLGMSSGGSSGLHMLQSEGSTAGGSGSLGGGGFPDFGRGSSGEGLHSRGMGSKHDIGSSGSAEGRGGSSGSQDGGETLYLKGADDG

SEQ ID NO: 79 - DNA, 636 bp, Citrus sinensis
atgcagcagccaccgcaaatgatccctgttatgccttcatttccacccaccaacatcaccacagagcagattcaaaagtaccttgatgagaacaaaaagttgattttggcaattttggacaatcaaaatcttggaaagcttacagaatgtgcccactatcaagctcagcttcaaaagaatttaatgtatttagctgcaattgctgatgcacaaccacaagcaccaacaatgcctcctcagatggctccacatcctgcaatgcaagctagtgggtattacatgcaacatcctcaggcggcagcaatggctcagcaacaaggaatctttccccaaaagatgccattacaattcaataaccctcatcaactacaggatcctcaacagcagctacaccaacatcaagccatgcaagcacaaatgggaatgagaccgggtgccactaacaatggtatgcatcccatgcatgctgaaagctctcttggaggtggcagcagtggaggacccccttcagcatcaggcccaggtgacatacgtggtggaaataagcaagatgcctcggaggctgggactactggtgctgatggccagggcagttcggctggtgggcatggtggggatggagaggaggcaaagtga

SEQ ID NO: 80 - protein, 211 aa, Citrus sinensis
MQQPPQMIPVMPSFPPTNITTEQIQKYLDENKKLILAILDNQNLGKLTECAHYQAQLQKNLMYLAAIADAQPQAPTMPPQMAPHPAMQASGYYMQHPQAAAMAQQQGIFPQKMPLQFNNPHQLQDPQQQLHQHQAMQAQMGMRPGATNNGMHPMHAESSLGGGSSGGPPSASGPGDIRGGNKQDASEAGTTGADGQGSSAGGHGGDGEEAK

SEQ ID NO: 81 - DNA, 729 bp, Cryptomeria japonica
atgcagcagcatctcatgcaaatgcagccgatgatggcagcagcttacgcttctaacaacattaccactgatcacattcaaaagtacttggatgagaacaagcagttgatattagcaattatggacaatcaaaatctgggaaagcttaatgaatgtgcacagtaccaagcaaaacttcaacagaacttgatgtatctagctgctattgctgattctcagcctcaagttccggctgcacatgctcagattcctcctaatgcggttgtgcagtctggtgggcttttcatgcagcaccagcaagcacagcagcaagttactcctcagtctcttatggcagctagatcttccatgttgtatacccagcagccgatggctgctttgcatcaagcccagcagcagcagcaacaacaatctcttcacagccatcttggtataagttctggaggaagcaatggcttgcacatgttgcatggtgaagcaaacatgggaggtaacgggcctctctcatctggaggcttccctgacttttcacgtggaactggggcctctggtgaaggcattcaggccaataggggcatgtgtatagatcgtggtgcaaataagcatgatggcgctggaacggagaatgctcatccaggcccaggggatgggcgagggagttcgactggaggccagaatacagatgggtcagaacaatcatacctgaaagcctcagaagaggggaactag

SEQ ID NO: 82 - protein, 242 aa, Cryptomeria japonica
MQQHLMQMQPMMAAAYASNNITTDHIQKYLDENKQLILAIMDNQNLGKLNECAQYQAKLQQNLMYLAAIADSQPQVPAAHAQIPPNAVVQSGGLFMQHQQAQQQVTPQSLMAARSSMLYTQQPMAALHQAQQQQQQQSLHSHLGISSGGSNGLHMLHGEANMGGNGPLSSGGFPDFSRGTGASGEGIQANRGMCIDRGANKHDGAGTENAHPGPGDGRGSSTGGQNTDGSEQSYLKASEEGN

SEQ ID NO: 83 - DNA, 651 bp, Curcuma longa
atgcagcaatctccacattcgctagcccccatgtcagcagcccctgttgcgaatattacaacagaacaaattcaaaagtacttggatgagaataagcagctcattttggcaatattggaaaatcagaaccttgggaaattggctgaatgtgctcagtaccaagcgcagcttcagaaaaatctactttatcttgctgcaattgctgatgctcaacctaatgcacctgcagttcgtccccagcagatcatgccacacggtacgataccacagggaagccctttcatgcaacaatcacccatcttccctcgaggtcctcttccatataatcctcaacaaatgcaagggcagctacatccccaacccccaggaatggtgttcccaggccatatgggcattaggcccggcgctgtcaacggcttacatggctcgcatactgaaccatctcatggtggcactgctaatcccctcacaactccaagcttgtctggattcccaccaaccaactcagatggacgtgggagtaagcaagaagccggcatcgccatggtacctgccgtagctgagagccacaggaactcaggaagtgagcctgtcagtggggatgctgatcaatcacatgctaaaagaccagaggatacaaagacaccatga

SEQ ID NO: 84 - protein, 216 aa, Curcuma longa
MQQSPHSLAPMSAAPVANITTEQIQKYLDENKQLILAILENQNLGKLAECAQYQAQLQKNLLYLAAIADAQPNAPAVRPQQIMPHGTIPQGSPFMQQSPIFPRGPLPYNPQQMQGQLHPQPPGMVFPGHMGIRPGAVNGLHGSHTEPSHGGTANPLTTPSLSGFPPTNSDGRGSKQEAGIAMVPAVAESHRNSGSEPVSGDADQSHAKRPEDTKTP

SEQ ID NO: 85 - DNA, 597 bp, Euphorbia esula
atgcagcagcaaccgcagatgatgcctatgatgccttcatatccaccagcaaacattaccacggagcaaatccaaaagtatcttgatgaaaataaaaaattgattttggcgatcttggataatcaaaatcttggaaaactcgctgagtgtgcacagtatcaagccctgctgcaaaaaaatctgatgtatttagccgcaattgctgatgcacaaccccagaccccacccatgccacctcagatgtccccacatccggctatgcaacaaggagcatattacatgcaacatcctcaggctgcagcagcagcaatggctcatcagtcgggtattttcccaccaaagatgtctccgttacaattcaataatcctcatcaaatacaggacccccagcagttacatcaagcagccctccaagggcaaatgggaatgaggcccatggggcccaataacgggatgcatccgatgcaccccgaggcaaatcttggaggatctaatgatggtcgtggaggaaacaaacaggatgctccggagacgggagcatcgggaggtgatgggcaaggcaattctggtggtgatggggctgaagatgggaaatga

SEQ ID NO: 86 - protein, 198 aa, Euphorbia esula
MQQQPQMMPMMPSYPPANITTEQIQKYLDENKKLILAILDNQNLGKLAECAQYQALLQKNLMYLAAIADAQPQTPPMPPQMSPHPAMQQGAYYMQHPQAAAAAMAHQSGIFPPKMSPLQFNNPHQIQDPQQLHQAALQGQMGMRPMGPNNGMHPMHPEANLGGSNDGRGGNKQDAPETGASGGDGQGNSGGDGAEDGK

SEQ ID NO: 87 - DNA, 597 bp, Fragaria vesca
atgcagcagcagccacagcagatgatgcccaacatgacttcgcttcctcccaataccatcaccaccgagcaaattcagaagtgccttgatgagaacaaaaagttgattctagcaatattggacaatcaaaaccttggaaaacttgctgagtgtgcccagtaccaaactcagcttcaaaagaatctcatgtatttagcagcaattgctgatgcacaaccacaaccacaaccacaagcaccagcaatgccggcccagcagctggccccgcatcctgcgatgcaacaagctggatattacatgcagcatcctcaggctgcagcagcaatggctcagcaacagggtcttttccctcaaaagatgcaaatgcagtttaatagcccacaacaaatgcacgagatgcagcagcagttacaccaacaggccatgcatggccagatggggatgagacctggaggggccaatgggatgccttcaatgcatcatactgagaacacccatggaggaagcaagcaagacaactcagaggctggggcaggtggtgatggccaggggaactcagccggtggccacagaagtggcgacggagaggacaagtga

SEQ ID NO: 88 - protein, 198 aa, Fragaria vesca
MQQQPQQMMPNMTSLPPNTITTEQIQKCLDENKKLILAILDNQNLGKLAECAQYQTQLQKNLMYLAAIADAQPQPQPQAPAMPAQQLAPHPAMQQAGYYMQHPQAAAAMAQQQGLFPQKMQMQFNSPQQMHEMQQQLHQQAMHGQMGMRPGGANGMPSMHHTENTHGGSKQDNSEAGAGGDGQGNSAGGHRSGDGEDK

SEQ ID NO: 89 - DNA, 639 bp, Glycine max
atgcagcagcacctgatgcagatgcagcccatgatggctgcctactaccccaacaacgtcaccactgatcacattcaacagtacctggatgagaacaagtccttgattctgaagattgttgaaagccagaattctggcaagctgagcgagtgtgccgagaaccaatcaaggctgcagagaaatctcatgtacctagctgcaatagctgattctcaaccacaaccatctccattggctggtcagtatccttctagtggacttgtgcagcagggagcacactacatgcaggctcaacaggctcagcagatgtcacaacaacagctaatggcttcgcgctcctcgctcctgtactcccaacagcctttctcagtgcttcaacagcagcaaggcatgcacagccaacttggcatgagctccagtggaagtcaaggcctccacatgctgcaaagtgaagccactaatgttggaggcaatgcaaccataggaaccggaggagggtttccggactttgtacgcattggtagtggcaagcaagatattggaatctctggtgaaggcagaggaggaaactctagtggccactctggtgatggtggtgagacacttaattacctgaaagctgctggtgatggaaactga

SEQ ID NO: 90 - protein, 212 aa, Glycine max
MQQHLMQMQPMMAAYYPNNVTTDHIQQYLDENKSLILKIVESQNSGKLSECAENQSRLQRNLMYLAAIADSQPQPSPLAGQYPSSGLVQQGAHYMQAQQAQQMSQQQLMASRSSLLYSQQPFSVLQQQQGMHSQLGMSSSGSQGLHMLQSEATNVGGNATIGTGGGFPDFVRIGSGKQDIGISGEGRGGNSSGHSGDGGETLNYLKAAGDGN

SEQ ID NO: 91 - DNA, 633 bp, Glycine max
atgcagcagcacctgatgcagatgcagcccatgatggcaggctactaccccaacaacgtcaccactgatcacattcagcagtatctggatgagaacaagtccttaattctgaagattgttgaaagccagaattctggcaagctgagcgagtgtgccgagaaccaagcaaggcttcagagaaatctcatgtacttagctgcaatagctgattctcaaccccaaccacccaccatgtctggtcagtaccctccgagtgggatgatgcagcagggagcacagtacatgcaggctcaacaacaggcacagcagatgacaccacaacaactaatggcagcacgctcatctcttttgtacgcacagcagccgtactcagcacttcaacagcagcaagccatgcacagtgcactggggtcgagttcggggctccacatgctgcaaagtgaaggcagcaatgtgaatgtgggaggagggtttcctgactttgtgcgtggcggcagctccacaggggagggtttgcacagtggtggaaggggtatcattggaagtagcaagcaggaaatggggggttcaagtgaaggccgcggtgaagggggtgaaaacctctacctcaaagttgctgatgatggaaactag

SEQ ID NO: 92 - protein, 210 aa, Glycine max
MQQHLMQMQPMMAGYYPNNVTTDHIQQYLDENKSLILKIVESQNSGKLSECAENQARLQRNLMYLAAIADSQPQPPTMSGQYPPSGMMQQGAQYMQAQQQAQQMTPQQLMAARSSLLYAQQPYSALQQQQAMHSALGSSSGLHMLQSEGSNVNVGGGFPDFVRGGSSTGEGLHSGGRGIIGSSKQEMGGSSEGRGEGGENLYLKVADDGN

SEQ ID NO: 93 - DNA, 642 bp, Glycine max
atgcagcagacaccgccaatgattcctatgatgccttctttcccacctacgaacataaccaccgagcagattcaaaaataccttgatgagaacaagaagctgattctggcaatattggacaatcaaaatcttggaaaacttgcagaatgtgcccagtaccaagctcagcttcaaaagaatttgatgtatttagctgcaattgctgatgcccagcctcaaaccccggccatgcctccgcagatggcaccgcaccctgccatgcaaccaggattctatatgcaacatcctcaggctgctgcagcagcaatggctcagcagcagcaaggaatgttcccccagaaaatgccattgcaatttggcaatccacatcaaatgcaggaacaacaacagcagctacaccagcaggccatccaaggtcaaatgggacttagacctggagatataaataatggcatgcatccaatgcacagtgaggctgctcttggaggtggaaacagcggtggtccaccttcggctactggtccaaacgatgcacgtggtggaagcaagcaagatgcctctgaggctggaacagctggtggagacggccaaggcagctccgcggctgctcataacagtggagatggtgaagaggcaaagtga

SEQ ID NO: 94 - protein, 213 aa, Glycine max
MQQTPPMIPMMPSFPPTNITTEQIQKYLDENKKLILAILDNQNLGKLAECAQYQAQLQKNLMYLAAIADAQPQTPAMPPQMAPHPAMQPGFYMQHPQAAAAAMAQQQQGMFPQKMPLQFGNPHQMQEQQQQLHQQAIQGQMGLRPGDINNGMHPMHSEAALGGGNSGGPPSATGPNDARGGSKQDASEAGTAGGDGQGSSAAAHNSGDGEEAK

SEQ ID NO: 95 - DNA, 633 bp, Glycine max
atgcagcagacaccgcctatgattcctatgatgccttcgttcccacctacgaacataaccaccgagcagattcaaaaataccttgatgagaacaagaagctgattctggcaatattggacaatcaaaatcttggaaaacttgcagaatgtgcccagtaccaagctcagcttcaaaagaatttgatgtatttagctgcaattgctgatgcccagcctcaaacaccagccatgcctccacagatggcaccacaccctgccatgcaaccaggattctatatgcaacatcctcaggctgcagcagcagcaatggctcagcagcagcagcaaggaatgttcccccagaaaatgccattgcaatttggcaatccacatcaaatgcaggaacaacagcagcagctacaccagcaagccatccaaggtcaaatgggactgagacctggaggaataaataatggcatgcatccaatgcacaatgagggcggcaacagcggtggtccaccctcggctaccggtccgaacgacgcacgtggtggaagcaagcaagatgcttctgaggctggaacagctggtggagatggccaaggcagctctgcagctgctcataacagtggagatggtgaagaggcaaagtga

SEQ ID NO: 96 - protein, 210 aa, Glycine max
MQQTPPMIPMMPSFPPTNITTEQIQKYLDENKKLILAILDNQNLGKLAECAQYQAQLQKNLMYLAAIADAQPQTPAMPPQMAPHPAMQPGFYMQHPQAAAAAMAQQQQQGMFPQKMPLQFGNPHQMQEQQQQLHQQAIQGQMGLRPGGINNGMHPMHNEGGNSGGPPSATGPNDARGGSKQDASEAGTAGGDGQGSSAAAHNSGDGEEAK

SEQ ID NO: 97 - DNA, 633 bp, Glycine soya; identical to SEQ ID NO: 95

SEQ ID NO: 98 - protein, 210 aa, Glycine soya; identical to SEQ ID NO: 96

SEQ ID NO: 99 - DNA, 660 bp, Gossypium arboreum
  misc_feature (309)..(309): n is a, c, g, or t
atgcagcagcacctgatgcagatgcagcccatgatggcagcttattatcccaacaacgtcactactgatcatattcaacagtatctcgatgagaacaagtcattgatcttaaagattgttgagagccagaattctgggaaattgagtgaatgtgctgagaaccaagcaaggctgcagcgaaacctcatgtacctggctgccattgcggattctcaaccccaaccacccaccgtgcatgcacagtttccatctggtggtatcatgcagcaaggagctgggcactacatgcagcaccaacaagctcaacanatgacacaacagtcgcttatggctgctcggtcctcaatgttgtattctcagcaaccattttctgcactgcaacaacaacaacaacaaggctttgcacagtcagcttggcatgagctctggcgggagcacaggcctttcatatgctgcaaactgaatctagtactgcagggggcagtgagacaccttgggcccgagggttgtcctgatttggacgggggtcttttggagaggcatccctggtggcaggccaatggccgggggaacaaccaaaaatccggggaggccggctcacctaagggccgggaggagcccttggggcaggggggggtgatggggggaacctcttcttaa

SEQ ID NO: 100 - protein, 219 aa, Gossypium arboreum
  UNSURE (103)..(103): Xaa can be any naturally ocurring amino acid
MQQHLMQMQPMMAAYYPNNVTTDHIQQYLDENKSLILKIVESQNSGKLSECAENQARLQRNLMYLAAIADSQPQPPTVHAQFPSGGIMQQGAGHYMQHQQAQXMTQQSLMAARSSMLYSQQPFSALQQQQQQGFAQSAWHELWREHRPFICCKLNLVLQGAVRHLGPEGCPDLDGGLLERHPWWQANGRGNNQKSGEAGSPKGREEPLGQGGVMGGTSS

SEQ ID NO: 101 - DNA, 690 bp, Gossypium hirsutum
atgcagcagcacctgatgcagatgcagcccatgatggcagcttattatcccaacaacgtcactactgatcatattcaacagtatctcgatgagaacaagtcattgatcttaaagattgttgagagccagaattctgggaaattgagtgaatgtgctgagaaccaagcaaggctgcagcgaaacctcatgtacctggctgccattgcggattctcaaccccaaccacccaccgtgcatgcacagtttccatctggtggtatcatgcagccaggagctgggcactacatgcagcaccaacaagctcaacaaatgacacaacagtcgcttatggctgctcggtcctcaatgttgtattctcagcaaccattttctgcactgcaacaacaacagcagcaagctttgcacagtcagcttggcatgagctctggcggaagcacaggccttcatatgctgcaaactgaatctagtactgcaggtggcagtggagcacttggggccggagggtttcctgattttggacgtggttcttctggagaaggcatccatggtggcaggccaatggcaggtggaagcaagcaagatatcgggagtgccggctcagctgaaggtcgtggaggaagctctggtggtcagggtggtggtgatgggggtgaaaccctttacttaaaagcagccgatgatgggaactga

SEQ ID NO: 102 - protein, 229 aa, Gossypium hirsutum
MQQHLMQMQPMMAAYYPNNVTTDHIQQYLDENKSLILKIVESQNSGKLSECAENQARLQRNLMYLAAIADSQPQPPTVHAQFPSGGIMQPGAGHYMQHQQAQQMTQQSLMAARSSMLYSQQPFSALQQQQQQALHSQLGMSSGGSTGLHMLQTESSTAGGSGALGAGGFPDFGRGSSGEGIHGGRPMAGGSKQDIGSAGSAEGRGGSSGGQGGGDGGETLYLKAADDGN

SEQ ID NO: 103 - DNA, 642 bp, Gossypium hirsutum
atgccgcagccaccgcaaatgattcctgtgatgccttcatatccacctactaatatcactactgaacagattcagaagtaccttgatgagaataagaagttgattttggcaattttggacaatcagaatcttggaaaactcgctgaatgcgcccagtatcaagctcagctgcaaaagaatttgatgtatttagctgcaattgcggatgctcaacctcaatcaacgccagcaatgtcgcctcagatggcaccgcatccagcaatgcaacccggaggatattttatgcaacatcctcaagctgctgcaatgtcacagcaacctggcatgtaccctcaaaaggtgccattgcaattcaatagtccgcatcaaatgcaggaccctcagcacctcctatatcagcagcatcaacaagcaatgcaaggtcaaatgggaatcaggcctgggggacccaataatagcatgcatcccatgcattcagaggctagccttggaggcggcagcagtggtggtccccctcaaccttcaggcccaagtgatggacgtgctggaaacaagcaagagggctccgaagctggtggtaatgggcagggcagcacaactggtgggcatggtggcggtgatggagcggatgaggcaaagtga

SEQ ID NO: 104 - protein, 213 aa, Gossypium hirsutum
MPQPPQMIPVMPSYPPTNITTEQIQKYLDENKKLILAILDNQNLGKLAECAQYQAQLQKNLMYLAAIADAQPQSTPAMSPQMAPHPAMQPGGYFMQHPQAAAMSQQPGMYPQKVPLQFNSPHQMQDPQHLLYQQHQQAMQGQMGIRPGGPNNSMHPMHSEASLGGGSSGGPPQPSGPSDGRAGNKQEGSEAGGNGQGSTTGGHGGGDGADEAK

SEQ ID NO: 105 - DNA, 630 bp, Helianthus annuus
atgcagcagcacctgatgcagatgcagcccatgatggcagcctattatcccaccaacaacgtcactactgatcatattcaacagtacttggatgaaaacaagtctctgatcttgaagattgttgagagccaaaactctgggaaaatggctgaatgtgcagaacatcaggccaagcttcagagaaaccttatgtaccttgctgcaattgctgattctcaacctcaagcacctagtcttcactctcagtatcctcaaggtgggatgatgcagcagcaggctggaagtcactacatgcagcagcaccaacaggcacaacagatgtcaccacaagcactcatggctgcacgctcatccatgatgtacagtcagcagcagtactcttcactacagcagcaagcaatgcatagccatctgggcatgagttctggaactggaaccagtggacttcacatgctgcagaccgacaataatagcgcgggtgtcagtgggacccacctaagtggtgggttccccgactttggtcgtaagcaagatattggtcccaccggtgaggggcggggtggtggtagctctggcggtggagacggtggcgagacgctctacttgaagtcgcctgataaaggtaactga

SEQ ID NO: 106 - protein, 209 aa, Helianthus annuus
MQQHLMQMQPMMAAYYPTNNVTTDHIQQYLDENKSLILKIVESQNSGKMAECAEHQAKLQRNLMYLAAIADSQPQAPSLHSQYPQGGMMQQQAGSHYMQQHQQAQQMSPQALMAARSSMMYSQQQYSSLQQQAMHSHLGMSSGTGTSGLHMLQTDNNSAGVSGTHLSGGFPDFGRKQDIGPTGEGRGGGSSGGGDGGETLYLKSPDKGN

SEQ ID NO: 107 - DNA, 561 bp, Hordeum vulgare
atgcagcaagcgatgcccatgccgccggcggcggcggcgcctgggatgcctccttctgccggcctcagcaccgagcagatccaaaagtacctggatgaaaataaacaactaattttggctatcttggaaaatcagaacctgggaaagttggcggaatgtgctcagtatcaagctcagcttcagaagaatcttttgtatttggctgcgattgctgatactcagccacagacctctgtaagccgtcctcagatggcaccacctgctgcatccccaggggcagggcattacatgtcacaggtgccaatgttccctccgaggacccctctaacgcctcagcagatgcaggagcagcaactacagcaacaacaggctcagatgcttccgtttgctggtcaaatggttgcgagacccggggctgtcaatggcattccccaggcccctcaagttgaacaaccagcctatgcagcaggtggggccagttccgagccttctggcaccgagagccacaggagcactggcgccgataacgatggtgggagcggcttggctgaccagtcctaa

SEQ ID NO: 108 - protein, 186 aa, Hordeum vulgare
MQQAMPMPPAAAAPGMPPSAGLSTEQIQKYLDENKQLILAILENQNLGKLAECAQYQAQLQKNLLYLAAIADTQPQTSVSRPQMAPPAASPGAGHYMSQVPMFPPRTPLTPQQMQEQQLQQQQAQMLPFAGQMVARPGAVNGIPQAPQVEQPAYAAGGASSEPSGTESHRSTGADNDGGSGLADQS

SEQ ID NO: 109 - DNA, 555 bp, Lactuca serriola
  misc_feature (253)..(253): n is a, c, g, or t
atgaagcagccgatgatgccgaatccaatgatgtcttcttcgtttcctcctacaaacatcaccaccgatcagatccaaaagttccttgatgaaaacaagcaactaattatagcaataatgagcaacctaaatcttggaaagcttgctgaatgtgcccagtaccaagctctactccaaaaaaatttgatgtatctagcagccattgcagatgctcaaccacctacacctacaccaacactaaatatctcttatnagatgggcccggttccacatccagggatgccacagcaaggtggattttacatggcgcagcagcaccctcaggcggctgtaatgacggctcagccaccttctggttttccacaaccgatgcctggtatgcaatttaacagcccacaggctattcaagggcagatgggcgggaggtccggtgggccgccaagctcagccgctagtgatgtctggagaggaagcatgcaagatggtggtggtggtgctgctgctgatggtggtaaggatggtcatgctggcggtggacctgaggaagcaaagtaa

SEQ ID NO: 110 - protein, 184 aa, Lactuca serriola
  UNSURE (85)..(85): Xaa can be any naturally ocurring amino acid
MKQPMMPNPMMSSSFPPTNITTDQIQKFLDENKQLIIAIMSNLNLGKLAECAQYQALLQKNLMYLAAIADAQPPTPTPTLNISYXMGPVPHPGMPQQGGFYMAQQHPQAAVMTAQPPSGFPQPMPGMQFNSPQAIQGQMGGRSGGPPSSAASDVWRGSMQDGGGGAAADGGKDGHAGGGPEEAK

SEQ ID NO: 111 - DNA, 627 bp, Lycopersicon esculentum
atgcagcagcacctgatgcagatgcagcccatgatggcagcttactatccaacgaacgtcactactgaccatattcaacagtatttggatgaaaacaaatcactcattctgaagattgttgagagccagaactctgggaaactcagtgaatgtgcggagaaccaagctaggcttcagaggaatctgatgtaccttgctgcgattgctgattcacaacctcaaccttctagcatgcattctcagttctcttctggtgggatgatgcagccagggacacacagttacttgcagcagcagcagcagcaacaacaagcgcaacaaatggcaacacaacaactcatggctgcaagatcctcgtcgatgctctatggacaacagcagcagcaatctcagttatcgcaatatcaacaaggcttgcatagtagccaactcggcatgagttctggcagtggcggaagcactggacttcatcacatgcttcaaagtgaatcatcacctcatggtggtggtttctctcatgacttcggccgcgcaaataagcaagacattgggagtagtatgtctgctgaagggcgcggcggaagttcaggtggtgagaatctttatctgaaagcttctgaggattga

SEQ ID NO: 112 - protein, 208 aa, Lycopersicon esculentum
MQQHLMQMQPMMAAYYPTNVTTDHIQQYLDENKSLILKIVESQNSGKLSECAENQARLQRNLMYLAAIADSQPQPSSMHSQFSSGGMMQPGTHSYLQQQQQQQQAQQMATQQLMAARSSSMLYGQQQQQSQLSQYQQGLHSSQLGMSSGSGGSTGLHHMLQSESSPHGGGFSHDFGRANKQDIGSSMSAEGRGGSSGGENLYLKASED

SEQ ID NO: 113 - DNA, 624 bp, Malus domestica
atgcagcagccaccacaaatgatccccgtcatgccttcatttcctcccaccaacatcaccaccgaacaaattcagaagtaccttgatgacaacaaaaagttgattctggcaatattggataatcaaaatcttggaaaacttgctgagtgtgctcagtaccaggctctgcttcaaaagaatctgatgtatttagcagcaattgccgatgcgcaaccacaggcaccagctgcccctccccagatggccccacatcctgctatgcaacaggcaggatattacatgcaacatcctcaggcagcagcaatggctcagcaacagggtattttctccccaaagatgccgatgcaattcaataacatgcatcaaatgcacgatccacagcagcaccaacaagccatgcaagggcaaatgggaatgagacctggagggcctaacggcatgccttccatgcttcatactgaggccacacatggtggtggtagtggcggcccaaattcagctggagacccaaatgatgggcgtggaggaagcaagcaagacgcctctgagtctggggcaggtggtgatggccaggggacctcagccggcgggcgtggaactggtgatggagaggacggcaagtga

SEQ ID NO: 114 - protein, 207 aa, Malus domestica
MQQPPQMIPVMPSFPPTNITTEQIQKYLDDNKKLILAILDNQNLGKLAECAQYQALLQKNLMYLAAIADAQPQAPAAPPQMAPHPAMQQAGYYMQHPQAAAMAQQQGIFSPKMPMQFNNMHQMHDPQQHQQAMQGQMGMRPGGPNGMPSMLHTEATHGGGSGGPNSAGDPNDGRGGSKQDASESGAGGDGQGTSAGGRGTGDGEDGK

SEQ ID NO: 115 - DNA, 636 bp, Medicago trunculata
atgcagcagcacctgatgcagatgcagcccatgatggcagcttactatcctaacaacgtcactactgatcatattcaacagtatcttgatgagaacaagtccttgattctcaagattgttgaaagccagaacactggcaagctcaccgagtgtgctgagaaccaatcaaggcttcagagaaatctcatgtacctagctgcaatagctgattctcaaccccaaccacctactatgcctggccagtacccttcaagtggaatgatgcagcagggaggacactacatgcaggctcaacaagctcagcagatgacacaacaacaattaatggctgcacgttcctctcttatgtatgctcaacagcttcaacagcagcaagccttgcaaagccaacttggtatgaattccagtggaagtcaaggccttcacatgttgcatagtgaaggggctaatgttggaggcaattcatctctaggggctggttttcctgattttggccgtagctcagccggtgatggtttgcacggcagtggtaagcaagacattggaagcactgatggccgcggtggaagctctagtggtcactctggtgatggcggcgaaacactttacctgaaatcttctggtgatgggaattag

SEQ ID NO: 116 - protein, 211 aa, Medicago trunculata
MQQHLMQMQPMMAAYYPNNVTTDHIQQYLDENKSLILKIVESQNTGKLTECAENQSRLQRNLMYLAAIADSQPQPPTMPGQYPSSGMMQQGGHYMQAQQAQQMTQQQLMAARSSLMYAQQLQQQQALQSQLGMNSSGSQGLHMLHSEGANVGGNSSLGAGFPDFGRSSAGDGLHGSGKQDIGSTDGRGGSSSGHSGDGGETLYLKSSGDGN

SEQ ID NO: 117 - DNA, 639 bp, Medicago trunculata
atgcagcagacacctcaaatgattcctatgatgccttcattcccacaacaaacaaacataaccactgagcagattcaaaaatatcttgatgagaacaagaagctgatcctggcaatattggacaatcaaaatcttggaaaacttgcagaatgtgcccagtaccaagctcagcttcagaagaatttgatgtatttagctgcaattgctgacgcgcagccacaaacaccggccttgcctccacagatggccccgcaccctgcgatgcaacaaggattctatatgcaacatcctcaggctgcagcaatggctcagcaacaaggaatgttcccccaaaaaatgccaatgcagttcggtaatccgcatcaaatgcaggatcagcagcatcagcagcaacaacagcagctacatcagcaagctatgcaaggtcaaatgggacttagacctggagggataaataacggcatgcatccaatgcacaacgaggctgctctcggaggtagcggcagtggtggtcaaatgacgggcgtggtggtggagcaagcaagatgcttcggagctgggacagccggcggtgatggtcaaggaacctctgccgcagctgcgcacaacagtggagatgcttcagaagaaggaaagtaa

SEQ ID NO: 118 - protein, 213 aa, Medicago trunculata
MQQTPQMIPMMPSFPQQTNITTEQIQKYLDENKKLILAILDNQNLGKLAECAQYQAQLQKNLMYLAAIADAQPQTPALPPQMAPHPAMQQGFYMQHPQAAAMAQQQGMFPQKMPMQFGNPHQMQDQQHQQQQQQLHQQAMQGQMGLRPGGINNGMHPMHNEAALGGSGSGGPNDGRGGGSKQDASEAGTAGGDGQGTSAAAAHNSGDASEEGK

SEQ ID NO: 119 - DNA, 684 bp, Oryza sativa
atgcagcagcaacacctgatgcagatgaaccagggcatgatggggggatatgcttcccctaccaccgtcaccactgatctcattcagcagtatctggatgagaacaagcagctgatcctggccatccttgacaaccagaacaatgggaaggtggaagagtgcgctcggaaccaagctaagctccagcacaatctcatgtacctcgccgccatcgccgacagccagccgccgcagacggccgccatgtcccagtatccgtcgaacctgatgatgcagtccggggcgaggtacatgccgcagcagtcggcgcagatgatggcgccgcagtcgctgatggcggcgaggtcttcgatgatgtacgcgcagccggcgctgtcgccgctccagcagcagcagcagcagcaggcggcggcggcgcacgggcagctgggcatgggctcggggggcaccaccagcgggttcagcatcctccacggcgaggccagcatgggcggcggcggcggcggcggtggcgccggtaacagcatgatgaacgccggcgtgttctccgacttcggacgcggcggcggcggcggcggcaaggaggggtccacctcgctgtccgtcgacgtccggggcgccaactccggcgcccagagcggcgacggggagtacctcaagggcaccgaggaggaaggcagctag

SEQ ID NO: 120 - protein, 227 aa, Oryza sativa
MQQQHLMQMNQGMMGGYASPTTVTTDLIQQYLDENKQLILAILDNQNNGKVEECARNQAKLQHNLMYLAAIADSQPPQTAAMSQYPSNLMMQSGARYMPQQSAQMMAPQSLMAARSSMMYAQPALSPLQQQQQQQAAAAHGQLGMGSGGTTSGFSILHGEASMGGGGGGGGAGNSMMNAGVFSDFGRGGGGGGKEGSTSLSVDVRGANSGAQSGDGEYLKGTEEEGS

SEQ ID NO: 121 - DNA, 558 bp, Oryza sativa
atgcagcagcagccgatgccgatgcccgcgcaggcgccgccgacggccggaatcaccaccgagcagatccaaaagtatctggatgaaaacaagcagcttattttggctattttggaaaatcagaatctgggaaagttggcagaatgtgctcagtatcaagcgcagcttcagaagaatctcttgtacttggctgcaattgctgatactcaaccgcagaccactataagccgtccccagatggtgccgcatggtgcatcgccggggttaggggggcaatacatgtcgcaggtgccaatgttcccccccaggacccctctaacgccccagcagatgcaggagcagcagctgcagcaacagcaagcccagctgctctcgttcggcggtcagatggttatgaggcctggcgttgtgaatggcattcctcagcttctgcaaggcgaaatgcaccgcggagcagatcaccagaacgctggcggggccacctcggagccttccgagagccacaggagcaccggcaccgaaaatgacggtggaagcgacttcggcgatcaatcctaa

SEQ ID NO: 122 - protein, 185 aa, Oryza sativa
MQQQPMPMPAQAPPTAGITTEQIQKYLDENKQLILAILENQNLGKLAECAQYQAQLQKNLLYLAAIADTQPQTTISRPQMVPHGASPGLGGQYMSQVPMFPPRTPLTPQQMQEQQLQQQQAQLLSFGGQMVMRPGVVNGIPQLLQGEMHRGADHQNAGGATSEPSESHRSTGTENDGGSDFGDQS

SEQ ID NO: 123 - DNA, 618 bp, Oryza sativa
atgcagcagcagatggccatgccggcgggggccgccgccgccgcggtgccgccggcggccggcatcaccaccgagcagatccaaaagtatttggatgaaaataaacagctaattttggccatcctggaaaatcaaaacctagggaagttggctgaatgtgctcagtaccaagctcagcttcaaaagaatctcttgtatctggctgccattgcagatgcccaaccacctcagaatccaggaagtcgccctcagatgatgcagcctggtgctaccccaggtgctgggcattacatgtcccaagtaccgatgttccctccaagaactcccttaaccccacaacagatgcaagagcagcagcagcagcaactccagcaacagcaagctcaggctctagccttccccggccagatgctaatgagaccaggtactgtcaatggcatgcaatctatcccagttgctgaccctgctcgcgcagccgatcttcagacggcagcaccgggctcggtagatggccgaggaaacaagcaggatgcaacctcggagccttccgggaccgagagccacaagagtgcgggagcagataacgacgcaggcggtgacatagcggagaagtcctga

SEQ ID NO: 124 - protein, 205 aa, Oryza sativa
MQQQMAMPAGAAAAAVPPAAGITTEQIQKYLDENKQLILAILENQNLGKLAECAQYQAQLQKNLLYLAAIADAQPPQNPGSRPQMMQPGATPGAGHYMSQVPMFPPRTPLTPQQMQEQQQQQLQQQQAQALAFPGQMLMRPGTVNGMQSIPVADPARAADLQTAAPGSVDGRGNKQDATSEPSGTESHKSAGADNDAGGDIAEKS

SEQ ID NO: 125 - DNA, 624 bp, Panicum virgatum
atgcagcagcagatgcccatgcagtcggcgcccccggcgaccggcatcaccaccgagcagatccaaaagtatttggatgaaaataagcagcttattttggccatcctggaaaatcagaacttaggaaagttggctgaatgtgctcagtatcaagctcagcttcaaaagaatctcttgtacctggctgcgattgcagatgcccaaccccaaccaccacagaaccctgcaagtcgcccacagatgatgcaacctggcatggtaccaggtgcagggcattacatgtcccaagtaccaatgttcccgccaagaacaccattaaccccgcaacagatgcaagaacagcagcagcagcagcagcagcttcaacagcagcaagcacaggctcttgctttcccgggacagatggtcatgagacctaccattaatggcatgcagcctatgcaagccgaccctgctgccgccgccgccagcctacagcagtcagcacctggccctactgatgggcgaggaggcaagcaagatgcaactgctggggtgagcacagagccttctggcaccgagagccacaagagcacaaccgcagcagatcacgatgtgggcactgatgtcgcggagaaatcctaa

SEQ ID NO: 126 - protein, 207 aa, Panicum virgatum
MQQQMPMQSAPPATGITTEQIQKYLDENKQLILAILENQNLGKLAECAQYQAQLQKNLLYLAAIADAQPQPPQNPASRPQMMQPGMVPGAGHYMSQVPMFPPRTPLTPQQMQEQQQQQQQLQQQQAQALAFPGQMVMRPTINGMQPMQADPAAAAASLQQSAPGPTDGRGGKQDATAGVSTEPSGTESHKSTTAADHDVGTDVAEKS

SEQ ID NO: 127 - DNA, 645 bp, Physcomitrella patens
atgcagcaaatggcggcgtatacggggacgtctattaccacggagctaatccagaagtatctggacgagaacaagcagcttatcctcgcgattcttgacaatcaaaaccttggaaagctgaacgaatgcgctatgtatcaagcaaagttgcagcagaatcttatgtacctcgcagccattgcggatgcacaacctcaagtgagccaaaactcaactcaggtctcatcaggacaatctatgcagccctctcagcaatatattcaacagcagcagcagcagcagatgatgatgatgaatcagcgaaactcaatcccacaatacatgcaacaaagccaacaggggtcaccaaacgcaccatcaccgcagcagcagtcctaccacagccagcagccgcaaggtatggttccccagagaaactcagacatgcacttggtgaaaaactctacaggaggcaacggtaatcagacaggaggtagtgtatccgagtatggaaagcctgaggaatcccgggaggggaccccaacaagcttaagcacaagaaacgatggtccacaggcgggggcttctccgttgggacaagcgagagaaggcaatggagctgctggagaggactctgaggcttcttacttgaaaagctccgactaa

SEQ ID NO: 128 - protein, 214 aa, Physcomitrella patens
MQQMAAYTGTSITTELIQKYLDENKQLILAILDNQNLGKLNECAMYQAKLQQNLMYLAAIADAQPQVSQNSTQVSSGQSMQPSQQYIQQQQQQQMMMMNQRNSIPQYMQQSQQGSPNAPSPQQQSYHSQQPQGMVPQRNSDMHLVKNSTGGNGNQTGGSVSEYGKPEESREGTPTSLSTRNDGPQAGASPLGQAREGNGAAGEDSEASYLKSSD

SEQ ID NO: 129 - DNA, 609 bp, Physcomitrella patens
atgcagcaaatggcgccgtatgcggggacatctatcactactgagctcatccagaagtacctggacgagaacaagcagctgattctcgcaattctcgataatcaaaaccttggaaagctgaacgaatgtgctacgtatcaagcaaagttgcagcagaatcttatgtacctcgcagctattgcagacgcacaaccccaagttccagcagcacaaccaatgcaaccatcacagcaatatattcagcagcagcagcagcagatgatgatgaatcaacgaaatcagtacttgcagcaaaatcaacaaggagtacaaaacgcaccatcaccgcagtcgcagcagtcgtatcacaaccagcagccaggcatggtctcccagggaaactcggggatgcacatggtgaatagttccatgggtggtaatggcaaccagacaggaggaaatgtttccgagtatgggaaaccagaagattcccgggaggggactccaacaagcttgaatacaaggaatgaaggtccacaagcgggggcttccccactgggacaagcaagagaagggaatggtgcgccaggagaggattcagaggcttcatacttaaaaagctccgagtga

SEQ ID NO: 130 - protein, 202 aa, Physcomitrella patens
MQQMAPYAGTSITTELIQKYLDENKQLILAILDNQNLGKLNECATYQAKLQQNLMYLAAIADAQPQVPAAQPMQPSQQYIQQQQQQMMMNQRNQYLQQNQQGVQNAPSPQSQQSYHNQQPGMVSQGNSGMHMVNSSMGGNGNQTGGNVSEYGKPEDSREGTPTSLNTRNEGPQAGASPLGQAREGNGAPGEDSEASYLKSSE

SEQ ID NO: 131 - DNA, 654 bp, Physcomitrella patens
atgatgcagcacatggcgacgtatgccagctccaacatcacaacggagctcattcagaagtacttggacgagaataagcagttgattctcgctatcctcgacaaccaaaacctcggcaagctcaatgagtgtgcaacgtatcaagcgaagttgcagcagaatctcatgtatttggctgccatagctgatgctcagccacaaggcccatcttcgcagatgccagcacctgcgccggcgccaaccatgcaaccagctcagcagtacatgcaacagcagcaacaactccggatgatgagccaacagaacagtatgatcccttcctaccttcagcacagccaacaagcatcgcagcagaacttctacagtcaacaaagcctgctctccgggggagggggctcaatacacatgatgtccacggaccgcggcatcggaggcaatggatcccaggcttcgccaggatattctgatggagggcgggatcagagccaaatgggtttggcaatgcagggcgacatgcatggtggaaacgggacggacctggggtgctcctccccgcttggccaccgaggagacggtggtaacggccacggccaggggaccgatgactctgaagcttcctacttgaagggatctgatgggagcagtctgaattaa

SEQ ID NO: 132 - protein, 217 aa, Physcomitrella patens
MMQHMATYASSNITTELIQKYLDENKQLILAILDNQNLGKLNECATYQAKLQQNLMYLAAIADAQPQGPSSQMPAPAPAPTMQPAQQYMQQQQQLRMMSQQNSMIPSYLQHSQQASQQNFYSQQSLLSGGGGSIHMMSTDRGIGGNGSQASPGYSDGGRDQSQMGLAMQGDMHGGNGTDLGCSSPLGHRGDGGNGHGQGTDDSEASYLKGSDGSSLN

SEQ ID NO: 133 - DNA, 648 bp, Physcomitrella patens
atgatgcagcacatgacgacctatgccagctccaacatcaccacggagctcattcagaagtacttggacgagaataaacagctgattctcgccattctcgacaaccaaaacctcggcaagctcaatgagtgtgcgacgtatcaagcgaagctgcagcagaacctcatgtatctggccgctatagctgatgcccagccacaaggcccatctacgcagatgccagcgcccgcgccaactatgcaaccagctcaacaatacatgcaacagcagcaacagctccgcatgatgagccaacaaaatgccatgatcccctcctacctgcagcaaagccaacaagtttcccagcagaacttctacagccaacagagcctgcttaccggcggtggcagctccatccacatgatgtccactgatcgcggcatgggaggcaatgggtcacaagcctcacctggatattctgacggagggcgagatcagaaccaattgggtatgacgatgcagggcgacatgcatggtggaaacggcactgacttgggctgctcctcacctctcggccaccggggagatggcggtggcggccacggccagggcaacgacgactctgaagcttcttacttgaagggttccgatggcagcagtctgaactag

SEQ ID NO: 134 - protein, 215 aa, Physcomitrella patens
MMQHMTTYASSNITTELIQKYLDENKQLILAILDNQNLGKLNECATYQAKLQQNLMYLAAIADAQPQGPSTQMPAPAPTMQPAQQYMQQQQQLRMMSQQNAMIPSYLQQSQQVSQQNFYSQQSLLTGGGSSIHMMSTDRGMGGNGSQASPGYSDGGRDQNQLGMTMQGDMHGGNGTDLGCSSPLGHRGDGGGGHGQGNDDSEASYLKGSDGSSLN

SEQ ID NO: 135 - DNA, 747 bp, Picea sitchensis
atgcagcagcatctcatgcaaatgcagcccatgatggcggcatacgcctccaacaacatcaccactgatcacatccagaagtacctggatgagaacaagcagttgattctggcaattctggacaaccaaaatcttggaaagctcaatgagtgtgctcagtaccaagcaaaacttcagcagaatttgatgtatctggctgcgattgctgattctcaaccacaagcacaaactgcacatgctcagattcctcctaatgcagtgatgcagtctggtgggcattacatgcagcaccagcaggcacagcaacaagtgactcctcagtctctgatggcagctagatcttccatgctgtattctcagcagccgatggctgctttgcatcaagctcagcaacaacagcagcagcagcatcagcagcaacaacaatctcttcacagccagcttggcataaattctggaggaagcagtggattgcatatgttgcatggtgagacaaacatgggatgtaatgggcctctctcatctgggggcttccctgaatttgggcgtgggtctgctacctctgctgaaggtatgcaggccaacaggggcttcactatagatcgtggttcaaataagcaggatggagtaggatcagagaatgcccatccaggtgctggtgatggaagagggagttcaactggagggcagaatgcagatgagtcagaaccatcatacctgaaagcctccgaagaagaaggaaactag

SEQ ID NO: 136 - protein, 248 aa, Picea sitchensis
MQQHLMQMQPMMAAYASNNITTDHIQKYLDENKQLILAILDNQNLGKLNECAQYQAKLQQNLMYLAAIADSQPQAQTAHAQIPPNAVMQSGGHYMQHQQAQQQVTPQSLMAARSSMLYSQQPMAALHQAQQQQQQQHQQQQQSLHSQLGINSGGSSGLHMLHGETNMGCNGPLSSGGFPEFGRGSATSAEGMQANRGFTIDRGSNKQDGVGSENAHPGAGDGRGSSTGGQNADESEPSYLKASEEEGN

SEQ ID NO: 137 - DNA, 735 bp, Pinus taeda
atgcagcagcacctcatgcaaatgcagcccatgatggcggcctacgcctccaacaatatcaccactgatcacatccagaagtacctggatgagaacaagcagttgattctggcaattttggacaaccaaaatctcggaaagctcaatgagtgtgctcaataccaagcaaaacttcagcagaatttgatgtatctggctgctattgctgattctcaacctcaagcacaaactgcacatgctcagattcctccaaatgcggtgatgcagtctggtgggcattacatgcagcatcaacaggcacagcaacaagttactcctcagtctctgatggcagctagatcttccatactgtatgctcagcaacaacagcagcagcagcatcagcagcatcagcagcaacagcagcaacaacagtctcttcacagccagcttggcataaattctggaggaagcagcggtttgcatatgttgcatggtgagacaaacatgggatgtaatgggcctctgtcatctgggggattccctgaatttgggcgtgggtctgctacctctgctgatggtatgcaggtgaacaggggctttgctatagatcgtggttcaaacaagcaggatggagttggatcagagaatgcccatgctggtgctggtgatggaagagggagttcaactggagggcagaatgcagatgagtcagaaccatcatacctgaaggcctccgaggaagaaggaaactag

SEQ ID NO: 138 - protein, 244 aa, Pinus taeda
MQQHLMQMQPMMAAYASNNITTDHIQKYLDENKQLILAILDNQNLGKLNECAQYQAKLQQNLMYLAAIADSQPQAQTAHAQIPPNAVMQSGGHYMQHQQAQQQVTPQSLMAARSSILYAQQQQQQQHQQHQQQQQQQQSLHSQLGINSGGSSGLHMLHGETNMGCNGPLSSGGFPEFGRGSATSADGMQVNRGFAIDRGSNKQDGVGSENAHAGAGDGRGSSTGGQNADESEPSYLKASEEEGN

SEQ ID NO: 139 - DNA, 663 bp, Populus trichocarpa
atgcaacagcacctgatgcagatgcagcccatgatggcagcctattaccccagcaacgtcactactgatcatattcaacagtatctggacgaaaacaagtcattgattttgaagattgttgagagccagaattcagggaaactcagtgagtgtgcagagaaccaagcaagactgcaacaaaatctcatgtacttggctgcaattgctgattgtcagccccaaccacctaccatgcatgcccagttcccttccagcggcattatgcagccaggagcacattacatgcagcatcaacaagctcaacagatgacaccacaagcccttatggctgcacgctcttctatgctgcagtatgctcaacagccattctcagcgcttcaacaacagcaagccttacacagccagctcggcatgagctctggtggaagcgcaggacttcatatgatgcaaagcgaggctaacactgcaggaggcagtggagctcttggtgctggacgatttcctgattttggcatggatgcctccagtagaggaatcgcaagtgggagcaagcaagatattcggagtgcagggtctagtgaagggcgaggaggaagctctggaggccagggtggtgatggaggtgaaaccctttacttgaaatctgctgatgatgggaactga

SEQ ID NO: 140 - protein, 220 aa, Populus trichocarpa
MQQHLMQMQPMMAAYYPSNVTTDHIQQYLDENKSLILKIVESQNSGKLSECAENQARLQQNLMYLAAIADCQPQPPTMHAQFPSSGIMQPGAHYMQHQQAQQMTPQALMAARSSMLQYAQQPFSALQQQQALHSQLGMSSGGSAGLHMMQSEANTAGGSGALGAGRFPDFGMDASSRGIASGSKQDIRSAGSSEGRGGSSGGQGGDGGETLYLKSADDGN

SEQ ID NO: 141 - DNA, 627 bp, Populus trichocarpa
atgcagcagccaccgcaaatgattcctgtcatttctccatttccaccaacaaacatcaccactgagcagatccaaaagtaccttgacgaaaacaaaaagttgattttggctatattggacaaccaaaaccttggaaaacttgctgaatgtgcccagtatcaagcccagctgcagaagaatttgatgtatttggctgcaattgctgatgcccaaccacaggcaccagcaatgcctccccagatggccccgcatcctgcaatgcaacaaggggcatattacatgcaacatcctcaggcagcagcaatggctcagcagccaggtgttttcccccaaaagatgctattacaattcaatgctggacatcaaatgcaggatcctcagcagttacaccaacaagccatgcaagggcaaataggaattagacctataggggctaacaatggcatgcatcccatgcacgctgagattgctcttggaagcagtggcccttcagcaagtgctggcacaaatgatgtacgtgggggaagcaaacaggatgcctctgaggctggcacaaccggtgctgatggcctagggggctctgctgctgggcataatggtgctgacggttccgaggatgcaaaatga

SEQ ID NO: 142 - protein, 208 aa, Populus trichocarpa
MQQPPQMIPVISPFPPTNITTEQIQKYLDENKKLILAILDNQNLGKLAECAQYQAQLQKNLMYLAAIADAQPQAPAMPPQMAPHPAMQQGAYYMQHPQAAAMAQQPGVFPQKMLLQFNAGHQMQDPQQLHQQAMQGQIGIRPIGANNGMHPMHAEIALGSSGPSASAGTNDVRGGSKQDASEAGTTGADGLGGSAAGHNGADGSEDAK

SEQ ID NO: 143 - DNA, 438 bp, Populus trichocarpa
atgcagcagtcaccgcaacaaatgttgagcatcaccactgagcagattcaaaagtacttagaagagaacaagcagctgattatggctatactggagaatcagaacaagggaaacgtttctgaatgtgcttcgtatcaagcccagttacagcagaacctgatgtacctagcaagaattgctgatgcccaaccacaaggaaccacaatgccttctcagatgccccctcagcagcccgcagtgaagcaagagcagtacatgcagccatctcaagttgctatgactcagcaaccaattttcttcaatcagaagctccctttccaaacgaactttcagcatgagcagcagcaacagctgccaccacacctccaacagcaacacttcacccaaggacagatgagaatgagacccggtgtcactgatcaagattctgatgcctaa

SEQ ID NO: 144 - protein, 145 aa, Populus trichocarpa
MQQSPQQMLSITTEQIQKYLEENKQLIMAILENQNKGNVSECASYQAQLQQNLMYLARIADAQPQGTTMPSQMPPQQPAVKQEQYMQPSQVAMTQQPIFFNQKLPFQTNFQHEQQQQLPPHLQQQHFTQGQMRMRPGVTDQDSDA

SEQ ID NO: 145 - DNA, 645 bp, Prunus persica
atgcagcagccacagcaaatgatccctgtgatgcctacttcatttccacccactaacatcaccaccgagcaaattcagaagtaccttgacgagaacaaaaaattgattctggcaatattggataatcaaaaccttggaaaacttgctgagtgtgcccagtaccaagctcagcttcaaaagaatctgatgtatttagcagctattgctgatgcacaaccacaggcaccaacagtgcctgctcagatggccccacatcctgctatgcaacaagcaggatattacatgcaacatcctcaggcagcagcaatggctcagcaacagggtattttccccccaaagatgccattgcagttcaataacccgcaccaaatgcatgatgcagcacagcagctacaccagcagcaccaacaagccatgcaagggcaaatgggaatgagagctggaggggccaatggcatgccttccatgcatcatactgaagccacacttggtggtggtagtggtggccccacttcaggtggagggggtccaaacgatgggcgtggaggaaagcagcaagactactcagaggctgggacaggtggtgatggccaggggagctcagccggcgggcatggcaatggtgatggagaagatggaaagtga

SEQ ID NO: 146 - protein, 214 aa, Prunus persica
MQQPQQMIPVMPTSFPPTNITTEQIQKYLDENKKLILAILDNQNLGKLAECAQYQAQLQKNLMYLAAIADAQPQAPTVPAQMAPHPAMQQAGYYMQHPQAAAMAQQQGIFPPKMPLQFNNPHQMHDAAQQLHQQHQQAMQGQMGMRAGGANGMPSMHHTEATLGGGSGGPTSGGGGPNDGRGGKQQDYSEAGTGGDGQGSSAGGHGNGDGEDGK

SEQ ID NO: 147 - DNA, 678 bp, Saccharum officinarum
atgcagcagcaacacctgatgcagatgaaccagaacatgattgggggctacacctctcctgccgctgtgacaaccgatctcatccagcagtacctggatgagaacaagcagctgatcctggccatcctcgacaaccagaacaatggcaaggtggaggagtgcgaacggcaccaagctaagctccagcacaacctcatgtacctggccgccatcgccgacagccagccaccacagactgcaccactatcacaatacccgtccaacctgatgatgcagccgggccctcggtacatgccaccgcagtccgggcagatgatgagcccgcagtcgctaatggcggcgcggtcctccatgatgtacgcgcacccgtccatgtcaccactccagcagcagcaggcagcgcacgggcagctgggcatggcttcagggggcggcggtggcacgaccagtgggttcaacatcctccatggcgaggccagtatgggcggtgctggtggcgcttgtgccggcaacaacatgatgaacgccggcatgttctcaggctttggccgcagcggcagtggcgccaaggagggatcgacctcgctgtcggttgacgtccgtggtggcaccagctccggcgcgcaaagcggggacggcgagtacctgaaagcaggcaccgaggaagaaggcagttaa

SEQ ID NO: 148 - protein, 225 aa, Saccharum officinarum
MQQQHLMQMNQNMIGGYTSPAAVTTDLIQQYLDENKQLILAILDNQNNGKVEECERHQAKLQHNLMYLAAIADSQPPQTAPLSQYPSNLMMQPGPRYMPPQSGQMMSPQSLMAARSSMMYAHPSMSPLQQQQAAHGQLGMASGGGGGTTSGFNILHGEASMGGAGGACAGNNMMNAGMFSGFGRSGSGAKEGSTSLSVDVRGGTSSGAQSGDGEYLKAGTEEEGS

SEQ ID NO: 149 - DNA, 561 bp, Saccharum officinarum
atgcagcagccgatgcccatgcagccgcaggcgccggagatgaccccggccgccggaatcaccacggagcagatccaaaagtatctggatgagaataagcagcttattttggctattttggaaaatcagaacctaggaaaattggcagaatgtgctcagtatcaatcacaacttcagaagaacctcttgtatctcgctgcaatcgcagatgcccaaccacagactgctgtaagccgccctcagatggcgccgcctggtgcattgcctggagtagggcagtacatgtcacaggtgcctatgttcccaccgaggacacctctaacaccccagcagatgcaggagcagcaacttcagcagcagcaggctcagctgctaaatttcagtggcctaatggttgctagacctggcatggtcaacggcatgcctcagtccattcaagttcagcaagctcagccaccaccagcagggaacaaacaggatgctggtggggtcgcctcggagccctcgggcattgagaaccacaggagcactggtggtgataatgatggtggaagcgactag

SEQ ID NO: 150 - protein, 186 aa, Saccharum officinarum
MQQPMPMQPQAPEMTPAAGITTEQIQKYLDENKQLILAILENQNLGKLAECAQYQSQLQKNLLYLAAIADAQPQTAVSRPQMAPPGALPGVGQYMSQVPMFPPRTPLTPQQMQEQQLQQQQAQLLNFSGLMVARPGMVNGMPQSIQVQQAQPPPAGNKQDAGGVASEPSGIENHRSTGGDNDGGSD

SEQ ID NO: 151 - DNA, 642 bp, Saccharum officinarum
atgcagcagcagatgcccatgccgccggcgcccgctgcggcggcggcgcccccggcggccggcatcaccaccgagcagatccaaaagtatttggacgaaaataagcaacttattttggccatcctggaaaatcagaacttaggaaagttggctgaatgtgctcagtatcaagctcaacttcaaaagaacctcttgtacctggctgcgattgctgatgcccaaccccagccaccacaaaaccctgcaggtcgccctcagatgatgcaacctggtatagtgccaggtgcggggcattacatgtcacaagtaccaatgttccctccaagaactccattaaccccacagcagatgcaagagcagcagcagcaacagcttcagcagcagcaagcgcaggctcttacattccctggacagatggtcatgagaccagctaccatcaacggcatacagcagcctatgcaagctgaccctgcccgggcagcggagctgcaacaaccaccacctatcccagctgacgggcgagtaagcaagcagcaggacacaacggctggcgtgagctcagagccttctgccaatgagagccacaagaccacaactggagcagatagtgaggcaggtggtgacgtggcggagaaatcctaa

SEQ ID NO: 152 - protein, 213 aa, Saccharum officinarum
MQQQMPMPPAPAAAAAPPAAGITTEQIQKYLDENKQLILAILENQNLGKLAECAQYQAQLQKNLLYLAAIADAQPQPPQNPAGRPQMMQPGIVPGAGHYMSQVPMFPPRTPLTPQQMQEQQQQQLQQQQAQALTFPGQMVMRPATINGIQQPMQADPARAAELQQPPPIPADGRVSKQQDTTAGVSSEPSANESHKTTTGADSEAGGDVAEKS

SEQ ID NO: 153 - DNA, 645 bp, Solanum tuberosum
atgcagcagcacctgatgcagatgcagcccatgatggcagcttactatccaacgaacgtcactactgaccatattcaacagtatttggatgagaacaaatcactcattctgaaaattgttgagagccaaaactcgggaaaactcagtgaatgtgcagagaaccaagctaggcttcagaggaatctgatgtaccttgctgctattgctgattcacaacctcagccttctagcatgcattctcagttctcttctggtgggatgatgcagccagggacacacagttacctgcagcagcagcagcagcaacaacaagcgcaacaaatggcaacacaacaactcatggctgcaagatcctcatcaatgctctatggacaacaacagcagcagcagcagcagtctcagttatcacaatttcaacaaggcttgcatagtagccaacttggcatgagttctggcagtggtggaagcactggacttcatcacatgcttcaaagtgaatcatcacctcatggtggtggtttctctcatgacttcggccgtgcaaataagcaagacattgggagtagtatgtctgctgaagggcgcggcggaagctcaggtggtgatggtggtgagaatctttatctgaaagcttctgaggattga

SEQ ID NO: 154 - protein, 214 aa, Solanum tuberosum
MQQHLMQMQPMMAAYYPTNVTTDHIQQYLDENKSLILKIVESQNSGKLSECAENQARLQRNLMYLAAIADSQPQPSSMHSQFSSGGMMQPGTHSYLQQQQQQQQAQQMATQQLMAARSSSMLYGQQQQQQQQSQLSQFQQGLHSSQLGMSSGSGGSTGLHHMLQSESSPHGGGFSHDFGRANKQDIGSSMSAEGRGGSSGGDGGENLYLKASED

SEQ ID NO: 155 - DNA, 681 bp, Solanum tuberosum
atgcagcagcagcacctgatgcagatgcagcccatgatggcagcctattatcccaacaatgtcactactgatcatattcaacagttcctggatgagaacaaatcacttattctgaagattgttgagagccagaactctgggaaaataagtgaatgtgcagagtcccaagctaaacttcagagaaatcttatgtaccttgcagctattgctgattcacagccccagcctcctagtatgcattcacagttagcttctggtgggatgatgcagggaggggcacattatatgcagcaacaacaagctcaacaactcacaacgcaatcgcttatggctgcagcaagatcctcctcctcaatgctctatggacaacaacaacaacaacaacaacaacaactatcatcattgcaacaacagcaagcagcctttcatagccagcaactcggaatgagcagctctggtggaggaagcagtagtggacttcacatgctacaaagcgaaaacactcatagtgctagcactggtggtggtggtttccctgactttggcagaggattaggcagtggaaacaagcatgaaatgggaagttctatgtctgatcaaggacggggcggaagctcgagtggtcatggtggtgatggaggtgagaatctttacttgaaatcttctgaagatgggaattag

SEQ ID NO: 156 - protein, 226 aa, Solanum tuberosum
MQQQHLMQMQPMMAAYYPNNVTTDHIQQFLDENKSLILKIVESQNSGKISECAESQAKLQRNLMYLAAIADSQPQPPSMHSQLASGGMMQGGAHYMQQQQAQQLTTQSLMAAARSSSSMLYGQQQQQQQQQLSSLQQQQAAFHSQQLGMSSSGGGSSSGLHMLQSENTHSASTGGGGFPDFGRGLGSGNKHEMGSSMSDQGRGGSSSGHGGDGGENLYLKSSEDGN

SEQ ID NO: 157 - DNA, 615 bp, Solanum tuberosum
atgcagcaaccaccacccatgattccaatgatgccctcttttccttctcctaatatcactactgagcagattcaaaagtacctggacgagaacaagacattgattttggccatattggaccatcaaaatcttgggaaactagctgaatgtgcacagtaccaggctaaacttcagaagaacttgatgtacttggccgctattgctgatgctcaaccacaatcaccagctattccaacgcaaatggctcctcatcctgcaatgcaacaaggaggattttacatgcagcaccctcaggctgcagccatgactcaacaacaaggtatgtttacttcaaagatgccactgcagttcaacaacccacagcaactacacgatcagcagcagcttcaacatcaacatcaacatcaacaactacagcgacagcagcaaggtatgcaacttggaggtgccaacagtggaatgcactccactcttggtagtacaagtaatgttagccagcttacaacttcaggtgctggtgatgcacgcggaggaaacaaacaagacaactctgaagcgggtgctgatggtcaggctagctcagtgactgcccaagtctcggaagaacgcaagtga

SEQ ID NO: 158 - protein, 204 aa, Solanum tuberosum
MQQPPPMIPMMPSFPSPNITTEQIQKYLDENKTLILAILDHQNLGKLAECAQYQAKLQKNLMYLAAIADAQPQSPAIPTQMAPHPAMQQGGFYMQHPQAAAMTQQQGMFTSKMPLQFNNPQQLHDQQQLQHQHQHQQLQRQQQGMQLGGANSGMHSTLGSTSNVSQLTTSGAGDARGGNKQDNSEAGADGQASSVTAQVSEERK

SEQ ID NO: 159 - DNA, 678 bp, Sorghum bicolor
atgcagcagcaacacctgatgcagatgaaccagaacatgattgggggctacacctctcctgccgctgtgaccaccgatctcatccagcagtacctggatgagaacaagcagctgatcctggccatcctcgacaaccagaacaatggaaaggtggaggagtgcgaacggcaccaagctaagctccagcacaacctcatgtacctggcggccatcgctgacagccagccaccacagactgcaccactatcacagtacccgtccaacctgatgatgcagccaggccctcggtacatgccaccgcagtccgggcagatgatgagcccgcagtcgctaatggcggcgcggtcctccatgatgtacgcgcacccgtccatgtcgccactccagcagcagcaggcagcgcacggccagctgggcatggcttcagggggcggcggtggcacgaccagtgggttcagcatcctccacggcgaggccagcatgggcggtgctgctggcgcaggcaccggcaacagcatgatgaacgccggcatgttctcaggctttggccgcagcggcagtggcgccaaggagggatcgacctcgctgtctgttgacgtccgtggtggcaccagctccggcgcgcagagcggggacggcgagtacctgaaagcaggcaccgaggaagaaggcagttaa

SEQ ID NO: 160 - protein, 225 aa, Sorghum bicolor
MQQQHLMQMNQNMIGGYTSPAAVTTDLIQQYLDENKQLILAILDNQNNGKVEECERHQAKLQHNLMYLAAIADSQPPQTAPLSQYPSNLMMQPGPRYMPPQSGQMMSPQSLMAARSSMMYAHPSMSPLQQQQAAHGQLGMASGGGGGTTSGFSILHGEASMGGAAGAGTGNSMMNAGMFSGFGRSGSGAKEGSTSLSVDVRGGTSSGAQSGDGEYLKAGTEEEGS

SEQ ID NO: 161 - DNA, 561 bp, Sorghum bicolor
atgcagcagccgatgcccatgcagccgcaggcgccggcgatgaccccggccgccggaatcaccacggagcagatccaaaagtatctggatgagaataagcagcttattttggctattttggaaaatcagaacctaggaaaattggcagaatgtgctcagtatcaatcacaacttcagaagaacctcttgtatctcgctgcaatcgcagatgcccaaccacagactgctgtaagccgccctcagatggcgccgcctggtgcattgcctggagtagggcagtacatgtcacaggtgcctatgttcccaccaaggacacctctcacaccccaacagatgcaggagcagcaacttcagcagcagcaggctcagttgctaaatttcagtggccagatggttgctagacctggcatggtcaacggcatgcctcagtccattcaagctcaacaagctcagccatcaccagcattgaacaaacaggatgctggtggagtcgcctcagagccctcgggcactgagagccacaggagcactggtggtgataatgatggtggaagcgactag

SEQ ID NO: 162 - protein, 186 aa, Sorghum bicolor
MQQPMPMQPQAPAMTPAAGITTEQIQKYLDENKQLILAILENQNLGKLAECAQYQSQLQKNLLYLAAIADAQPQTAVSRPQMAPPGALPGVGQYMSQVPMFPPRTPLTPQQMQEQQLQQQQAQLLNFSGQMVARPGMVNGMPQSIQAQQAQPSPALNKQDAGGVASEPSGTESHRSTGGDNDGGSD

SEQ ID NO: 163 - DNA, 645 bp, Sorghum bicolor
atgcagcagcagatgcccatgccgccggcgcccgctgcggcggcggcgacggcgcccccggcggccggcatcaccaccgagcagatccagaagtatttggacgaaaataagcaacttattttggccatcctagaaaatcagaacttaggaaagttggctgaatgtgctcagtatcaagctcaacttcaaaagaacctcttgtacctggctgcgattgctgatgcccaaccccgaccaccgcaaaaccctgcaggtcgccctcagatgatgcaacctggtatagtgccaggtgcagggcattacatgtcacaagtaccaatgttccctccaagaactccattaaccccacagcaaatgcaagagcagcagcagcaacagcttcagcagcagcaagcgcaggctcttgcattccctgggcagatggtcatgagaccagctaccatcaacggcatgcagcagcctatgcaggctgaccctgcccgggcagcggagctgcaacagccagcatctgtcccagccgacgggcgagtaagcaagcaggacacagcggctggggtgagctcagagccttctgccaatgagagccacaagaccacaaccggagcagatagtgaggcaggtggagacgtggcggagaaatcctaa

SEQ ID NO: 164 - protein, 214 aa, Sorghum bicolor
MQQQMPMPPAPAAAAATAPPAAGITTEQIQKYLDENKQLILAILENQNLGKLAECAQYQAQLQKNLLYLAAIADAQPRPPQNPAGRPQMMQPGIVPGAGHYMSQVPMFPPRTPLTPQQMQEQQQQQLQQQQAQALAFPGQMVMRPATINGMQQPMQADPARAAELQQPASVPADGRVSKQDTAAGVSSEPSANESHKTTTGADSEAGGDVAEKS

SEQ ID NO: 165 - DNA, 552 bp, Taraxacum officinale
atgaagcagccgatgatgcctaatccaatgatgtcttctccgtttcctccttccaacatcaccaccgatcagatccaaaagttcctagacgaaaacaagcaactgatattagcaataatgaacaaccaaaacctaggaaagcttgctgaatgtgcccagtatcaagctctactccaaaagaatttaatgtatctagcagccattgcagatgctcaaccaccaacaccaacaccaacaccaaatatctcatctcagatgggcccggttccacatccagggatgccacaacaaggtggattctacatggggcagcaccctcaagcggcagtaatggcggctcagccaccttctggtttcccacaaccaatgccaggcatgcagtttaataccccacagggtatccaaggtcagatgggcgggaggtccggtgggccaccaaactcagctggcggcgatgtttggagaggaagcatgcaagatggtggtggtggcggtgttgatggtggtaaggatggtcatgctggcggtggtccaccggaggaaggaaagtga

SEQ ID NO: 166 - protein, 183 aa, Taraxacum officinale
MKQPMMPNPMMSSPFPPSNITTDQIQKFLDENKQLILAIMNNQNLGKLAECAQYQALLQKNLMYLAAIADAQPPTPTPTPNISSQMGPVPHPGMPQQGGFYMGQHPQAAVMAAQPPSGFPQPMPGMQFNTPQGIQGQMGGRSGGPPNSAGGDVWRGSMQDGGGGGVDGGKDGHAGGGPPEEGK

SEQ ID NO: 167 - DNA, 636 bp, Taraxacum officinale
atgcagcagcaacagcatcaacaaccaccgcaatcgcaactgcaaccgcccaccttaaactccggtgctccattttctcccaatgcgatcacctccgaccagattcaaaagtgtctggatgacaacgagaacctgattatagcaatattggaaaatcaaaatcttgggaaatttcaggagtgtgctcagtatcaagccattctccaaaagaacttaatgtatttagctgcaattgctgatgctcaaccaccaacacaacaaccatcaactcctcaaatgccaccaaattccattcctcaacaaccaaacaattacatgcaacaacaacaccaaatcaccgcccctcaacaaggcggcataggtggtggtggcggtgttccaaaactaccctttcaacttaatgcccttcgtacacaagatcaacaacaacaattactccaatttcaacaacaacaacaacttcaagcacaaatggggatgagacctagttcccaagatgggatgcttggaatgcatcaagctatgcagtctgcactcgcgggcaatccgggcagtttgatggatggtagagggaacaagcaagatggatcagaggcggcggcttctggtggtggtggtggtaatagagaatcatga

SEQ ID NO: 168 - protein, 211 aa, Taraxacum officinale
MQQQQHQQPPQSQLQPPTLNSGAPFSPNAITSDQIQKCLDDNENLIIAILENQNLGKFQECAQYQAILQKNLMYLAAIADAQPPTQQPSTPQMPPNSIPQQPNNYMQQQHQITAPQQGGIGGGGGVPKLPFQLNALRTQDQQQQLLQFQQQQQLQAQMGMRPSSQDGMLGMHQAMQSALAGNPGSLMDGRGNKQDGSEAAASGGGGGNRES

SEQ ID NO: 169 - DNA, 678 bp, Triticum aestivum
atgcagcagcaacacctgatgcagatgaaccagagcatgatggggggctacgcttcctctaccactgtcaccactgatctcattcagcagtacctggatgagaacaagcagctgatcctggccatcctcgacaaccagaacaacggcaaggtggaggagtgcgcacggaaccaagctaagctccagcagaacctcatgtacctcgccgccatcgccgacagccagcctccgcagacggcatcgctgtctcagtacccgtccaacctgatgatgcagtccgggccgcggtacatgcagcagcagtcggcgcagatgatgtcgccgcagtcgctgatggcggcgcggtcgtcgatgatgtacgcgcagcaggccatgtcgccgctccagcagcagcagcagcagcagcaccaggcggccgcgcacggccagctggggatgtcctccggcgcgaccaccgggttcaacctcctccacggcgaggccagcatgggcggcggcggcggcggcgccagtggcaacagcatgatgaacgccggcgtcttctcggactaccgccgcggcggcagcggcgccaaggaggggtcgacctcgctgtcggccgacgctcgcggcgccaactctggcgcgcacagcggcgacggggagtacctcaagggcaccgaggaggaaggaagctag

SEQ ID NO: 170 - protein, 225 aa, Triticum aestivum
MQQQHLMQMNQSMMGGYASSTTVTTDLIQQYLDENKQLILAILDNQNNGKVEECARNQAKLQQNLMYLAAIADSQPPQTASLSQYPSNLMMQSGPRYMQQQSAQMMSPQSLMAARSSMMYAQQAMSPLQQQQQQQHQAAAHGQLGMSSGATTGFNLLHGEASMGGGGGGASGNSMMNAGVFSDYRRGGSGAKEGSTSLSADARGANSGAHSGDGEYLKGTEEEGS

SEQ ID NO: 171 - DNA, 558 bp, Triticum aestivum
atgcagcaagcgatgcccatgccgccggcggcggcggcgccggggatgcctccgtctgctggcctcagcaccgagcagatccaaaagtacctggatgaaaataagcaactaattttggctatcttggaaaatcagaacctgggaaagttggcggaatgtgctcagtatcaagctcagcttcagaagaatcttttgtatttggctgcaatcgctgatactcagccacagaccactgtaagccgtcctcagatggcaccacctagtgcatccccaggggcagggcattacatgtcacaggtgccaatgttccctccgaggacccctctaacgcctcagcagatgcaggagcagcaactacagcagcaacaggctcagatgcttccgtttgctggtcaaatggttgcgagacctggggctgtcaatggcatgcctcaggcccctcaagttgaaccagcctatgcagcaggtggggccagttctgagccttctggcactgagagccacaggagcactggtgccgataatgacggggggagcggctgggctgatcagtcctaa

SEQ ID NO: 172 - protein, 185 aa, Triticum aestivum
MQQAMPMPPAAAAPGMPPSAGLSTEQIQKYLDENKQLILAILENQNLGKLAECAQYQAQLQKNLLYLAAIADTQPQTTVSRPQMAPPSASPGAGHYMSQVPMFPPRTPLTPQQMQEQQLQQQQAQMLPFAGQMVARPGAVNGMPQAPQVEPAYAAGGASSEPSGTESHRSTGADNDGGSGWADQS

SEQ ID NO: 173 - DNA, 603 bp, Triticum aestivum
atgcagcaggcgatgtccttgcccccgggagcggtcggcgcggtgtcctcgccggccggcatcaccaccgagcagatccaaaagtatttggatgaaaataagcaacttattttggccatccttgaaaatcagaacctaggaaagttggctgaatgtgctcagtatcaagctcaactccaaaagaatctcttgtatctagctgctatcgcggatgcccaaccaccacagaaccctacaagtcaccctcagatggtgcagcctggtagtatgcaaggtgcagggcattacatgtcacaagtaccaatgttccctccaagaacgcctttaaccccacagcagatgcaagagcagcagcaccagcagcttcagcagcagcaagcccaggccctttctttccccgcccaggtggtcatgagaccaggcaccgtcaacggcatgcagcagcctatgcaagcagccggcgacctccagccagcagcagcacctggagggagcaagcaggacgccgcagtggctggggccagctcggaaccatctggcaccaagagccacaagaacgcgggagcagaggaggtgggcgctgatgtagcagaacaatcctaa

SEQ ID NO: 174 - protein, 200 aa, Triticum aestivum
MQQAMSLPPGAVGAVSSPAGITTEQIQKYLDENKQLILAILENQNLGKLAECAQYQAQLQKNLLYLAAIADAQPPQNPTSHPQMVQPGSMQGAGHYMSQVPMFPPRTPLTPQQMQEQQHQQLQQQQAQALSFPAQVVMRPGTVNGMQQPMQAAGDLQPAAAPGGSKQDAAVAGASSEPSGTKSHKNAGAEEVGADVAEQS

SEQ ID NO: 175 - DNA, 672 bp, Vitis vinifera
atgcagcagcacctgatgcagatgcagcccatgatggcagcctattaccccagcaacgtcaccactgatcacattcagcagtatcttgatgaaaacaagtcattgattctgaagattgttgagagccagaattcaggaaaattgactgaatgtgcagagaaccaggcaagactacagagaaacctcatgtacctggctgcaattgctgattctcaaccccaaccacccaccatgcatgctcagttccctcctagtggcattgttcagccaggagctcactacatgcaacaccaacaagctcaacaaatgacaccacagtcgctcctggctgcacgctcctccatgctgtacacccaacaaccattttcggccctgcaacaacaacaagccatccatagccagcttggcatgggctctggtggaagtgcaggacttcacatgctgcaaagcgaggggagtaatccaggaggcaatggaacactggggactggtgggtttcctgatttcagccgtggaacttctggagaaggcctgcaggctgcaggcaggggaatggctggtgggagcaagcaagatatgggaaatgcagaagggcgaggagggaactcaggaggtcagggtggggatggaggtgagactctttacttgaaagctgctgaagatgggaattga

SEQ ID NO: 176 - protein, 223 aa, Vitis vinifera
MQQHLMQMQPMMAAYYPSNVTTDHIQQYLDENKSLILKIVESQNSGKLTECAENQARLQRNLMYLAAIADSQPQPPTMHAQFPPSGIVQPGAHYMQHQQAQQMTPQSLLAARSSMLYTQQPFSALQQQQAIHSQLGMGSGGSAGLHMLQSEGSNPGGNGTLGTGGFPDFSRGTSGEGLQAAGRGMAGGSKQDMGNAEGRGGNSGGQGGDGGETLYLKAAEDGN

SEQ ID NO: 177 - DNA, 675 bp, Vitis vinifera
atgcagcaacaccttatgcagatgcagcctatgatggcaggaagccataacctcagcagcatcactactgatcacatccaacagtacctagatgagaacaagtctttgattttgaaaattcttgagagccaaaattcagggaaactcagtgaatgtgcggagaaccaagcaagacttcagcgaaaccttatgtaccttgctgcaattgctgattgccaaccacaaccaccatccctgcaggctcagttttcccccaatatggtcatgcaaccaggagtcaactacatgcagcaccaacaatcccaacagatgatgccacagtcactaatggcagcccgagcacccatgttgtatgctcagcagcatccatatttggcattgcagcaacaacaagctctacaaagccagcttggcatgagctccactggaatgggtggaatccacatgctacaaagtgaacctaatgttggagggaatgggactggagccttttccgatcttggtcgcagcatgactggggagggcttgtcggctgtgagcaggggactgggtagtgcaagcaagcaagatgtggggagtgtaggctctgcggaaggtcgacgtggctacttgggagggcaaggtgcagataaaggagaaactctttactttaaaagtgctgaagaaaaggactga

SEQ ID NO: 178 - protein, 224 aa, Vitis vinifera
MQQHLMQMQPMMAGSHNLSSITTDHIQQYLDENKSLILKILESQNSGKLSECAENQARLQRNLMYLAAIADCQPQPPSLQAQFSPNMVMQPGVNYMQHQQSQQMMPQSLMAARAPMLYAQQHPYLALQQQQALQSQLGMSSTGMGGIHMLQSEPNVGGNGTGAFSDLGRSMTGEGLSAVSRGLGSASKQDVGSVGSAEGRRGYLGGQGADKGETLYFKSAEEKD

SEQ ID NO: 179 - DNA, 669 bp, Vitis vinifera
atgcagcagaacccccagatgatacctgttatgccttcttttccacccaacaacatcactaccgagcagattcagaagtatctcgatgagaataaaaaattgattctggcaatattggacaatcaaaaccttggaaagcttgctgagtgtgcacagtaccaagctcagcttcaaaagaatttgatgtatctagctgcaattgctgatgctcagccacaggcaccaccgacaatgcctccccagatggccccacaccctgcaatgcagcagggagggtactacatgcagcatccccaggcggcagcaatggctcagcaacctggtcttttccctcccaagatgcccttacaatttggtaacccacatcaacttcaggagcaagcacagcagctgcagcagctacagcaacaagccatgcaagggcagatgggcatgagacctggaggggccaacaacggcatgcatcccatgcatcctgaggccactcttggtggtggcagcagtggtggccctccaccatctgccggcctcagtgatgcacgcggaggtggcaagcaagacacttccgaagcaggggcttctggtggtgatggtcaggggagctcagctgctgggcatggcggcgatggcgaatcaccctacttgaaggggtcagaggatggaaagtga

SEQ ID NO: 180 - protein, 222 aa, Vitis vinifera
MQQNPQMIPVMPSFPPNNITTEQIQKYLDENKKLILAILDNQNLGKLAECAQYQAQLQKNLMYLAAIADAQPQAPPTMPPQMAPHPAMQQGGYYMQHPQAAAMAQQPGLFPPKMPLQFGNPHQLQEQAQQLQQLQQQAMQGQMGMRPGGANNGMHPMHPEATLGGGSSGGPPPSAGLSDARGGGKQDTSEAGASGGDGQGSSAAGHGGDGESPYLKGSEDGK

SEQ ID NO: 181 - DNA, 597 bp, Vitis vinifera
atgcagcagcaaccaccacagatgatgaacattgcgccttcatttcctcccaccgccatcaccactgagcagattcagaagtatctggatgagaacaaacaattgattctggcaattctggaaaaccagacccttggaaaactcgccgagtgtgcccaatatcaagcccagcttcagaagaacttgatatatctagctgcaattgctgatgcccaaccaccagcaccaacagtgcctcctcagatgcctatacatcatgccatgcaacaagggcattacatgcaacaccctcaggctgctgcagctcagcaacaaccaggcatgtttggtgcaaagttgcctttccagcttagcgatcagcaacagcagcagcagcatcattttttacacctccaacaacagcaacccatccaagggctcatgggcatgaggcctatcatcaacaatggcatgcatcaggccatgcaaactgggcttggtgctttgagcggtttcatggatgtacgtggaagcaagccagatggctcagaggttggttttggtgatggccaagggaagtttgcttctggacatggcagtggaaatagagattcctaa

SEQ ID NO: 182 - protein, 198 aa, Vitis vinifera
MQQQPPQMMNIAPSFPPTAITTEQIQKYLDENKQLILAILENQTLGKLAECAQYQAQLQKNLIYLAAIADAQPPAPTVPPQMPIHHAMQQGHYMQHPQAAAAQQQPGMFGAKLPFQLSDQQQQQQHHFLHLQQQQPIQGLMGMRPIINNGMHQAMQTGLGALSGFMDVRGSKPDGSEVGFGDGQGKFASGHGSGNRDS

SEQ ID NO: 183 - DNA, 735 bp, Volvox carteri
atggcggcagtgtcaggtcaggccaagccagccccaatgacaacggagcgaatccaagaaatgcttgaagaaaacttcaagtttatcaaggcactcgccgaacagcaaaaccttggtcgaatgcaggacgtcatccagttccagcagaagcttcaagaaaaccttatgctactagcagctgtggcggacacctactcatcagcgtctgcaacgggagctgctgcccaggcgactgcagctcccggcatggcggcacaggcggcccggccgcccgctgctgctctccctggaacagctgttgctacggcggcgctcccgctccctggcttgccgcaacaacagcaaccgcagcagcagcagcagccgcagcagcagccagggcagcccagcccgctaatgatggtcatgccgggctcttccgggacgcaggcgcctacgcaactgggggccatgcaactcacgcagcagcagatacaagctgcggtacagcaagcgctagtccgacagcagcagcagcaacaacaacagcagcagcaaaatccaaatccgtttcaggggcagcaattccagctgccacagtcacttcagcagccgcagtccctgggacagcagccagttttaagtgcgatgggggccctgggagggcccttggctggtcaggggacggcggcagggcaggcgggagcaggtggtttccagctgcccgcggcgcctcctttgaaccttgggctttga

SEQ ID NO: 184 - protein, 244 aa, Volvox carteri
MAAVSGQAKPAPMTTERIQEMLEENFKFIKALAEQQNLGRMQDVIQFQQKLQENLMLLAAVADTYSSASATGAAAQATAAPGMAAQAARPPAAALPGTAVATAALPLPGLPQQQQPQQQQQPQQQPGQPSPLMMVMPGSSGTQAPTQLGAMQLTQQQIQAAVQQALVRQQQQQQQQQQQNPNPFQGQQFQLPQSLQQPQSLGQQPVLSAMGALGGPLAGQGTAAGQAGAGGFQLPAAPPLNLGL

SEQ ID NO: 185 - DNA, 699 bp, Welwitschia mirabilis
atgcaaatgcagcctatgataggggcaggatactcctccaatagcatcaccactgatcacattcagaagtatttggatgagaataggcaattgattctggcaattcttgacaaccaaaatcttggaaagttgaatgaatgtgcacaataccaagccaggcttcaacaaaatttaatgtatttggctgctattgctgattcccaaccgcaaacacctgctgcacatgcccagatcgcatccaatgcaatgcttcaagcaggtggtcattatatgcagcaccagcagacagtaactccccagtcacttcttgctgcaaggtcatctatgctttacagtcagcaacctatgactgcattccatcaagcacagcagcagcagcaacaacaatctctccatggccagttggggataaattcaggaggaaacaatggattacatattcttcatggtgaaacaagcatgggtagtaatggacctctcacgacaggaagctttcctgattttgggcgaggttcagtaaattgtgatctattgcagggcaataggagcttgactattgaccgtggctctagcaagattgatgggcttggaacagagaatacgcaccctgtagaagggcgaggaggagcaagtgtgggccaaaacacagaagaaggggcaccatcttatttgaaagcttctgaggatgagggaagctag

SEQ ID NO: 186 - protein, 232 aa, Welwitschia mirabilis
MQMQPMIGAGYSSNSITTDHIQKYLDENRQLILAILDNQNLGKLNECAQYQARLQQNLMYLAAIADSQPQTPAAHAQIASNAMLQAGGHYMQHQQTVTPQSLLAARSSMLYSQQPMTAFHQAQQQQQQQSLHGQLGINSGGNNGLHILHGETSMGSNGPLTTGSFPDFGRGSVNCDLLQGNRSLTIDRGSSKIDGLGTENTHPVEGRGGASVGQNTEEGAPSYLKASEDEGS

SEQ ID NO: 187 - DNA, 684 bp, Zea mays
atgcagcagcaacacctgatgcagatgaaccagaacatgatggggggctacacctctcctgccgccgtgaccaccgatctcatccagcagcacctggacgagaacaagcagctgatcctggccatcctcgacaaccagaacaatggcaaggcggaggagtgcgaacggcaccaagctaagctccagcacaacctcatgtacctggccgccatcgctgacagccagccgccacagaccgcgccactatcacagtacccgtccaacctgatgatgcagccgggccctcggtacatgccaccgcagtccgggcagatgatgaacccgcagtcgctgatggcggcgcggtcctccatgatgtacgcgcacccgtccctgtcgccactccagcagcagcaggcggcgcacggacagctgggtatggctccagggggcggcggtggcggcacgaccagcgggttcagcatcctccacggcgaggccagcatgggcggtggtggtgctggcgcaggcgccggcaacaacatgatgaacgccggcatgttctcgggctttggccgcagcggcagtggcgccaaggaagggtcgacctctctgtcggttgacgtccggggtggaaccagctccggcgcgcagagcggggacggcgagtacctcaaagtcggcaccgaggaagaaggcagttag

SEQ ID NO: 188 - protein, 227 aa, Zea mays
MQQQHLMQMNQNMMGGYTSPAAVTTDLIQQHLDENKQLILAILDNQNNGKAEECERHQAKLQHNLMYLAAIADSQPPQTAPLSQYPSNLMMQPGPRYMPPQSGQMMNPQSLMAARSSMMYAHPSLSPLQQQQAAHGQLGMAPGGGGGGTTSGFSILHGEASMGGGGAGAGAGNNMMNAGMFSGFGRSGSGAKEGSTSLSVDVRGGTSSGAQSGDGEYLKVGTEEEGS

SEQ ID NO: 189 - DNA, 549 bp, Zea mays
atgcagcagccgatgcacatgcagccacaggcgccggcgataaccccagctgccggaatcagcacggagcagatccaaaagtatctggatgagaataagcagcttattttggctattttggaaaatcagaacctaggaaaattggcagaatgtgctcagtatcaatcacaacttcagaagaacctcttgtatctcgctgcaatcgcagatgctcaaccgcagactgctgtaagccgccctcagatggcgccgcctggtggatcgcctggagtagggcagtacatgtcacaggtgcctatgttcccaccgaggacacctcttacaccccagcagatgcaggagcagcagcttcagcagcagcaggctcagttgctaaacttcagtggccaaatggttgctagaccaggcatggtcaacggcatggctcagtccatgcaagctcagctaccaccgggtgtgaacaagcaggatgctggtggggtcgcctctgagccctcgggcaccgagagccacaggagcactggtggtgacgatggtggaagcgactag

SEQ ID NO: 190 - protein, 182 aa, Zea mays
MQQPMHMQPQAPAITPAAGISTEQIQKYLDENKQLILAILENQNLGKLAECAQYQSQLQKNLLYLAAIADAQPQTAVSRPQMAPPGGSPGVGQYMSQVPMFPPRTPLTPQQMQEQQLQQQQAQLLNFSGQMVARPGMVNGMAQSMQAQLPPGVNKQDAGGVASEPSGTESHRSTGGDDGGSD

SEQ ID NO: 191 - DNA, 663 bp, Zea mays
atgcagcagcagatgcccatgccgccggcgcccgctgccgccgcggcggcggcgcccccggcggcaggcatcactaccgagcagatccagaagtatttggacgaaaataagcaacttattttggccatcctggaaaatcagaacttagggaagttggctgaatgtgctcagtatcaagctcaacttcaaaagaacctcttgtacctggctgcgattgctgatgcccaaccccagcctccgcaaaaccctgcaggtcgccctcagatgatgcagcctggtatagtgccaggtgcggggcattacatgtcacaagtaccaatgttccctccaagaaccccattaaccccacagcagatgcaggagcagcagcaacaacaacagtttcagcagcagcagcagcaagtgcaggctcttacatttcctggacagatggtcatgagaccaggcaccatcaacggcatgcagcagcagcagcctatgcaggctgaccctgcccgggcagcagcggagctgcagcaggcagcacctatcccagctgacgggcgaggaagcaagcaggacaccgcgggtggggcgagctcagagccttctgccaatgagagccacaagagcgccaccggagcagataccgaggcaggtggcgacgtggccgagaaatcctaa

SEQ ID NO: 192 - protein, 220 aa, Zea mays
MQQQMPMPPAPAAAAAAAPPAAGITTEQIQKYLDENKQLILAILENQNLGKLAECAQYQAQLQKNLLYLAAIADAQPQPPQNPAGRPQMMQPGIVPGAGHYMSQVPMFPPRTPLTPQQMQEQQQQQQFQQQQQQVQALTFPGQMVMRPGTINGMQQQQPMQADPARAAAELQQAAPIPADGRGSKQDTAGGASSEPSANESHKSATGADTEAGGDVAEKS

SEQ ID NO: 193 - DNA, 1173 bp, Homo sapiens
atgggcggcaacatgtctgtggctttcgcggccccgaggcagcgaggcaagggggagatcactcccgctgcgattcagaagatgttggatgacaataaccatcttattcagtgtataatggactctcagaataaaggaaagacctcagagtgttctcagtatcagcagatgttgcacacaaacttggtataccttgctacaatagcagattctaatcaaaatatgcagtctcttttaccagcaccacccacacagaatatgcctatgggtcctggagggatgaatcagagcggccctcccccacctccacgctctcacaacatgccttcagatggaatggtaggtgggggtcctcctgcaccgcacatgcagaaccagatgaacggccagatgcctgggcctaaccatatgcctatgcagggacctggacccaatcaactcaatatgacaaacagttccatgaatatgccttcaagtagccatggatccatgggaggttacaaccattctgtgccatcatcacagagcatgccagtacagaatcagatgacaatgagtcagggacaaccaatgggaaactatggtcccagaccaaatatgagtatgcagccaaaccaaggtccaatgatgcatcagcagcctccttctcagcaatacaatatgccacagggaggcggacagcattaccaaggacagcagccacctatgggaatgatgggtcaagttaaccaaggcaatcatatgatgggtcagagacagattcctccctatagacctcctcaacagggcccaccacagcagtactcaggccaggaagactattacggggaccaatacagtcatggtggacaaggtcctccagaaggcatgaaccagcaatattaccctgatggaaattcacagtatggccaacagcaagatgcataccagggaccacctccacaacagggatatccaccccagcagcagcagtacccagggcagcaaggttacccaggacagcagcagggctacggtccttcacagggtggtccaggtcctcagtatcctaactacccacagggacaaggtcagcagtatggaggatatagaccaacacagcctggaccaccacagccaccccagcagaggccttatggatatgaccagggacagtatggaaattaccagcag

SEQ ID NO: 194 - protein, 391 aa, Homo sapiens
MGGNMSVAFAAPRQRGKGEITPAAIQKMLDDNNHLIQCIMDSQNKGKTSECSQYQQMLHTNLVYLATIADSNQNMQSLLPAPPTQNMPMGPGGMNQSGPPPPPRSHNMPSDGMVGGGPPAPHMQNQMNGQMPGPNHMPMQGPGPNQLNMTNSSMNMPSSSHGSMGGYNHSVPSSQSMPVQNQMTMSQGQPMGNYGPRPNMSMQPNQGPMMHQQPPSQQYNMPQGGGQHYQGQQPPMGMMGQVNQGNHMMGQRQIPPYRPPQQGPPQQYSGQEDYYGDQYSHGGQGPPEGMNQQYYPDGNSQYGQQQDAYQGPPPQQGYPPQQQQYPGQQGYPGQQQGYGPSQGGPGPQYPNYPQGQGQQYGGYRPTQPGPPQPPQQRPYGYDQGQYGNYQQ

SEQ ID NO: 195 - DNA, 609 bp, Physcomitrella patens; identical to SEQ ID NO: 129

SEQ ID NO: 196 - protein, 202 aa, Physcomitrella patens; identical to SEQ ID NO: 130

SEQ ID NO: 197 - DNA, 552 bp, Chlamydomonas reinhardtii; identical to SEQ ID NO: 75

SEQ ID NO: 198 - protein, 183 aa, Chlamydomonas reinhardtii; identical to SEQ ID NO: 76

SEQ ID NO: 199 - DNA, 261 bp, Micromonas sp. RCC299
atgtcgactccggttcaggctcacgggaacgccgccgagaaggtgatcacgacggagcttattcaaaaatacctcgatgagaaccagacgctcatcctggccatcctggagaaccagaacgtgggcaagctggaggcgtgcaaccagtaccaggcgaggctgcagcagaacctgatgtacctggcggcgatcgcggacgcgcagccgcccccaaagccgggggcgaacgcggcacagggcggagcgggggcggcccaatga

SEQ ID NO: 200 - protein, 86 aa, Micromonas sp. RCC299
MSTPVQAHGNAAEKVITTELIQKYLDENQTLILAILENQNVGKLEACNQYQARLQQNLMYLAAIADAQPPPKPGANAAQGGAGAAQ

SEQ ID NO: 201 - DNA, 243 bp, Ostreococcus lucimarinus
atgtctggcgaacaagccggtccttcatttgtgacgcccggcgacgccgccgcgccgtccgtggtgacgacggagctgatacaaaagtatttggatgagaatcagcaactgattctcgcgatccttgagaatcaaaacgtcggcaagctcgcggagtgcgccaagtatcagaccaaactgcaggaaaacttgatgtacctagccgccatagcggatgcgaagccggcggagccgtcggaatag

SEQ ID NO: 202 - protein, 80 aa, Ostreococcus lucimarinus
MSGEQAGPSFVTPGDAAAPSVVTTELIQKYLDENQQLILAILENQNVGKLAECAKYQTKLQENLMYLAAIADAKPAEPSE

SEQ ID NO: 203 - DNA, 1215 bp, Glycine max
atggggaagaaaacagagctgaaagatcacaaggagatagccaaagttgaaactgttcttgagcttctcaggaaacaaacccctctcactgtgaaacaggagaagttttgcaactatgcttgtgtgaaacggtttctgaaagcaaaaggggatagtgtgaaaaaagcttcgaagcaactcaaggcttgtcttgcttggagagagagtgttatcgctgatcacttgatagcagatgatttctcagctgaactggctgatgggttggcctatttggctggtcatgatgacgaatccagacctgttatgatttttcgtttgaagcaagattatcaaaagttgcattcccagaagatgttcactcgtttgctggcctttacaatagaggtggccatttcgaccatgccaaaaaacgtagaacaattcgtgatgctttttgacgcaagcttttacagatcagcatctgctttcatgaacctattactaccagcactgaaaattgtggcggagtactacccaggaaggctatgcaaagcgtttgtcatagaccctccctcgcttttcgcttacttgtggaagggtgtgaggccgttcgtggaattatcatcatggacgacggtggtatcatcgttggatttcgaagaatcgttggacttcaacgacttcgcggcgtacccgcgagcctcgtccctccgattcgacagcgcgagcgtgaaatcaacggcgaagataggctcgtgctcctcgtcacggttctccttcaccgtatctcaccaccttgactcgttgaagccctggtacctgagcctggccgacacgtcagcatccaaagtgggacccacgagtccttcggccgcactcatctcgccgctgaacgcgcgctcgctctcgttcgcgtcgcccgtcgcgagaaccccccgaggccccccggccaccaggaagggcctcttcccctcaacgccgctgccgcagcgcgtgacggcgccgccgcggacctcgttcctccagtcgccggcgacgttcttcaggcgagatagccacgttgccgccaagggagagaggtgccgggaatcgttcttgccgtatgtgaagttctaccgaagaccatacgacgaaatggtgtataggtcaaagatgcggcccccactcggcggcctaatctccattgtttcccctcatatcacaagacgccatgtttccgtttctcagcgtttctaa

SEQ ID NO: 204 - protein, 404 aa, Glycine max
MGKKTELKDHKEIAKVETVLELLRKQTPLTVKQEKFCNYACVKRFLKAKGDSVKKASKQLKACLAWRESVIADHLIADDFSAELADGLAYLAGHDDESRPVMIFRLKQDYQKLHSQKMFTRLLAFTIEVAISTMPKNVEQFVMLFDASFYRSASAFMNLLLPALKIVAEYYPGRLCKAFVIDPPSLFAYLWKGVRPFVELSSWTTVVSSLDFEESLDFNDFAAYPRASSLRFDSASVKSTAKIGSCSSSRFSFTVSHHLDSLKPWYLSLADTSASKVGPTSPSAALISPLNARSLSFASPVARTPRGPPATRKGLFPSTPLPQRVTAPPRTSFLQSPATFFRRDSHVAAKGERCRESFLPYVKFYRRPYDEMVYRSKMRPPLGGLISIVSPHITRRHVSVSQRF

SEQ ID NO: 205 - DNA, 1218 bp, Medicago truncatula
atggggaagaaacttgaactcctcaaagacaaggaaactgctaaagttgaagctgttcttgaactcatcagaaaacaaacccctctcactgtcaaacaggaaaagttctgcaactatgcttgtgtgaaacggtttctgaaagtgaaaggagataatgtgaaaagagctgctaaacaactaagagcttgtctttcatggagagaaagtattgttactgatcaattgatagcagatgatttctcagctgaattatctgaagggttggcttatgtggctggtcatgatgatgaatccagacctgttttgattttccgcatgaaacaagactatcagaagttgcattctcagaaactgttcttcactcgtttattggctttcacaatggaagtggcaatttcaaacatgccaaaaaatgttgaacaatttgtcatgcttttcgatgcaagcttttacagatcagcatctggatttatgaacttgttgttgggagcattgaaaattgtgggtgagtactatccaggacggttaagcaaagcatttgtgatagaccctccatcactttttgcatacttgtggaagggtgttcgtccattcgttgagctatcaacatgcacaacaatagtatcatccctagatttcgaaccatcaatggactacaacgacttctcaacttacccaagagcctcatcactcagattcgatcaatcaacggcgaagatcggttcatgctcatcctcacgcttctccttccaagtctcacaccaactcgactcactgaaaccatggtaccttagcctaggaggagacaacacatcatcctccaaagtaggacccactagcccatcccttacaccactcaacgctcgctcactctcattcgcttcaccaatagcacgcaacccactgggcccaccagctagcaggaaggggttgttcccttcaacaccactgccgcagagagtgactactgctcctaaccggactacggcggcgtcgtttcttcagtctccggcgacgtttttcaggcgggatagggataatgtgaaggtggaaagaggtagagaaacatttttggcgtatgtgaaattctatagaagggcgtatgatgaaatggtttataggtcaaagatgaggcccccacttggtggattagtctccattgtttcacctcatcttagacgccgtcacactcacctttctgtttctcagcgtttctaa

SEQ ID NO: 206 - protein, 405 aa, Medicago truncatula
MGKKLELLKDKETAKVEAVLELIRKQTPLTVKQEKFCNYACVKRFLKVKGDNVKRAAKQLRACLSWRESIVTDQLIADDFSAELSEGLAYVAGHDDESRPVLIFRMKQDYQKLHSQKLFFTRLLAFTMEVAISNMPKNVEQFVMLFDASFYRSASGFMNLLLGALKIVGEYYPGRLSKAFVIDPPSLFAYLWKGVRPFVELSTCTTIVSSLDFEPSMDYNDFSTYPRASSLRFDQSTAKIGSCSSSRFSFQVSHQLDSLKPWYLSLGGDNTSSSKVGPTSPSLTPLNARSLSFASPIARNPLGPPASRKGLFPSTPLPQRVTTAPNRTTAASFLQSPATFFRRDRDNVKVERGRETFLAYVKFYRRAYDEMVYRSKMRPPLGGLVSIVSPHLRRRHTHLSVSQRF

SEQ ID NO: 207 - DNA, 1317 bp, Oryza sativa
atggccatggagaaggtggacgccaaggagagggagaagatcgaggccgtccgcaagaccctccgcaagcaggctccgctcaccgccaagcaggcgatgtactgcaacgacgcgtgcgtggagcggttcctccgggcgagaggggagagcgtgaagaaggcggcgaaacacctgagaaccgtcctgtcctggagggacaccatcggagccgatcacatcatcgccgacgagttctccgccgagctggctgacggcgtcgcctacgtcgccggccacgacgacgaggcccgacctgtcgtggtctttcgaatcaagcaggactacccaaagttccactcccagaaatcgttcgtgcggttactggtgttcacgctggaggtggccgtgtcatgcatgtcccgcttcgtcgaccagttcgtcctcctcttcgatgcaagctttttccggtcggcgtcggctttcctcaacctgctcatgggcacgctcaagatcgtcgccgactactaccccggccgcctccaccgcgccttcgtcatcgacccgccgtccctcttctccgtcctctggaagggagtgaggccgttcgtggagctggcgccggcgacggcggtggtgtgctcgctggacttcgaggactcgctggaggacgcgtcgttcacggcgtacccgcggacggcgtcgctgcggttcgagccggcggcggccctgctggcgaccgggacgaagggcatcggcgtcggctccgcctcgtcgcggttctccgtcaccgtgtcgcacgacaacaccctcaagccgtggtacctgtccaccaccacgccgtcgtcggtggggcctcgctccgtggtgccgacctccagcccgtccctcatcggcgcgtcgccgctctcggcgcgctccttctccttcgcctcccccgccgcgcgctccaccacgacgccgcccgtccaccgcggcgcaccgctgacgccgttctcgaccaagggcgggcagaaggcgccggcgccagcgcagcagttcccgcggacgccgcggccgtcgttcctgcagtcgccgtcgatgctgttcgcgttcaagaaggacggccaggccagccgcggcgagcgggagcgcgagtccttcctgccgttcctccgcttctaccgccgcccctacgacgagatatcgtatcgcgccaagatgcggccgccgctgggcgggctcatcgccatcgtcgacgagaagtcgaagcagcacaagacggtgcagccgccgctgcgacggcacgccgggctccaccaccagcagctgttccagctccaccaccaccagaggatctga

SEQ ID NO: 208 - protein, 438 aa, Oryza sativa
MAMEKVDAKEREKIEAVRKTLRKQAPLTAKQAMYCNDACVERFLRARGESVKKAAKHLRTVLSWRDTIGADHIIADEFSAELADGVAYVAGHDDEARPVVVFRIKQDYPKFHSQKSFVRLLVFTLEVAVSCMSRFVDQFVLLFDASFFRSASAFLNLLMGTLKIVADYYPGRLHRAFVIDPPSLFSVLWKGVRPFVELAPATAVVCSLDFEDSLEDASFTAYPRTASLRFEPAAALLATGTKGIGVGSASSRFSVTVSHDNTLKPWYLSTTTPSSVGPRSVVPTSSPSLIGASPLSARSFSFASPAARSTTTPPVHRGAPLTPFSTKGGQKAPAPAQQFPRTPRPSFLQSPSMLFAFKKDGQASRGERERESFLPFLRFYRRPYDEISYRAKMRPPLGGLIAIVDEKSKQHKTVQPPLRRHAGLHHQQLFQLHHHQRI

SEQ ID NO: 209 - DNA, 2016 bp, Physcomitrella patens
atggatcaatggcaagtgtgtgttacttatcatgtcgatgcgggctgtgctattaacgccattagaatcatgtcaatgcggaacttgtcatttataaggcgggatgaggtgccgatcgcatgcttgactggttttggtgaccgtcttttcgtggtggtgtcggtttctgttttggctgtgggttgttttcttgtcaactgttgtgccactttcccgagctgtgatcgttacgggcggcgttgcggaagatattgtgtttttggttgcgtttgcgttgcgatggagtgtcttgttgatagcagctttttgttgatggtgctgctgaatgttgtcagatcgttgatgtgtgtacgagttgcgggtcgggggaggtcattattattggttcctggtacttttatctcttcctggtgctgcgatgcttggctttcttgcatactgacggtcaactttctagaatggcactctgggcttagcgcagtgccaaaggcagtggaggaggttcctagaggacaccggagttgtgtaggagggctagagtgggattcatttggggacattggagcgacgcgggaaaatagaagggatagtttggaagtaaggaacatggagcaggaactagttgcagtggctgcttcccctgctaaagtggagccagaatcgactacaaaggagaagcggaaagaagtgctacagctcgtccaaaaagataacccccttaccaagaaagagttggacttttgtgatgacgcctgcgtagaccggtatttaaaagcttgtggaaacagtgtgcggcgggctgcgagaatgctcaaagctacccttaactggcgtgacaaaatcgaaattggctacatgatagcggacgaatttccagctgacatagccgcaggatctgcttatgtagctggtcatgacgaagacggtcgaccagtcttggttatcaagaggaagcccgatcacatcttgaatcatactcaaaaacaatatcttcgatatctgatcttcacaatggaagtagcgctggctgcaatggctccaggagtttatcaatgggtgcttatttttgatgctcgaggatattcaaaagctagcgctccatcacctagtggcattctcacgactttgaagatactctcagatcattatccagagaggctggcgaaggctttcattgtagatgcttcatccatgttttatcatatttggaaggggatgtgtacttttgttgaccatcccacgagagggaaattacattttgcctacaccaaagattacaaaggaactttaaaatcacagcagagctccaaagctgttcctttgtctccgtcttctgacagtgctccgcgaagatcatcaaatgcttgtgccgacgatttcaaatatcttacgtctcctcagtccactgtacaaggccgaaatgacatatctctaccaacagtttatgatgctagtccgaagaacaattgtcaagggcaaactcgtggcaagctgtcagatggccctgaattaattcacagtgttcggacaagatctttctcattctcctcgatcattaccatgtcttacactgcacctgaaccacgagatggtgaatcctctagttttaggaaagaaccagaagagatagttgacgaaccaaaagttgtggtcacgtcatctgttagaccaaaactcaccagagcaccctgggatggccttgtttccatattttactcgcagaagaaggacgaacacaagaagcagaatctttcacggaaggaggaagaacccgtggcattggacgaaccgacgaaggatgaattcaaaaaagaggaacacagaaaagacgacaacgtgaaagaagaacagaggagggatgaacagaaaattaggtccctagattcttttctgccatacttaagttttgtccaggaaccttacaatgaagaatcatatagggcattgatgaagcctccccttggtgggctggccatgataatttctactgaactaaacagtatggacagcttctaa

SEQ ID NO: 210 - protein, 671 aa, Physcomitrella patens
MDQWQVCVTYHVDAGCAINAIRIMSMRNLSFIRRDEVPIACLTGFGDRLFVVVSVSVLAVGCFLVNCCATFPSCDRYGRRCGRYCVFGCVCVAMECLVDSSFLLMVLLNVVRSLMCVRVAGRGRSLLLVPGTFISSWCCDAWLSCILTVNFLEWHSGLSAVPKAVEEVPRGHRSCVGGLEWDSFGDIGATRENRRDSLEVRNMEQELVAVAASPAKVEPESTTKEKRKEVLQLVQKDNPLTKKELDFCDDACVDRYLKACGNSVRRAARMLKATLNWRDKIEIGYMIADEFPADIAAGSAYVAGHDEDGRPVLVIKRKPDHILNHTQKQYLRYLIFTMEVALAAMAPGVYQWVLIFDARGYSKASAPSPSGILTTLKILSDHYPERLAKAFIVDASSMFYHIWKGMCTFVDHPTRGKLHFAYTKDYKGTLKSQQSSKAVPLSPSSDSAPRRSSNACADDFKYLTSPQSTVQGRNDISLPTVYDASPKNNCQGQTRGKLSDGPELIHSVRTRSFSFSSIITMSYTAPEPRDGESSSFRKEPEEIVDEPKVVVTSSVRPKLTRAPWDGLVSIFYSQKKDEHKKQNLSRKEEEPVALDEPTKDEFKKEEHRKDDNVKEEQRRDEQKIRSLDSFLPYLSFVQEPYNEESYRALMKPPLGGLAMIISTELNSMDSF

SEQ ID NO: 211 - DNA, 1284 bp, Populus trichocarpa
atgggcaagaaagaacagcaacttcaaccacagaaagatcacaaagacaatgatagaggtgaagctgttctcgagcttctaagaaaacatgctccactcactgttaaacaggagaagttctgcaacaatgcttgtgtggagaggtttctaagagcaaaaggtgataatgtgaagaaagctgctaagcacttaagggcctgcctttcttggagagagagtataggcactgagaatttgatagcggatgagttctcagctgagctagctgaaggagttgcttatgttgctggtcatgatgaagaatccagacctgttatgatttttcgaatcaagcaagattaccaaaagttccattcacaaaaactgttcactcggttgctagtgtttacactggaggtggcaatagggaccatgccaagaaacgcagaacaatttgttctcctctttgatgcaagctttttcaggtcagcatcggcttttatgaatttattgctcggaactctgaaaattgtggctgagtactacccaggcaggctttacaaggcttttgtaatcgacccgccttctctcttcccttatttatggaagggtgtccgtccatttgttgagctatcaacggccacgatggtggtatcttcactagactttgaagaatcactggagttcaatgacttttcctcctaccctcgagcctcctccctccgattggatccttcgtctgtcaagtcaacggctaagattggctcatgctcttcctctagattttccttcaccgtgtcccaccattttgactccctcaagccttggcacctaactttgactgacacgtcggcatcaaaagtaggaccaacaaacctctcttctctgggcccggccctcatctctcccctcaacgctagatccttttcttttgcgtcaccagttgccagaaccccacgtggcagcatgaacggtggcagctacactaggcttgcccagaaaagtctcttcccatcaaccccgttgccacagcgtgtcaccacgagtgacacactcaaaatctctcaaccgcggaccccacgcccctcgttcctccaatcacctgccttgtttttcaagaaggagtgccacgtcagcaaggcagacaggtctcgagaatcgttcgtgccatttttgaagttttataggaggccgtacgatgagatgatttataggtcaaagatgcggcctccactcgggggactcatatccattgtctcgcctcacatcaaacggcgccacatgtcagtatctcaacggttttaa

SEQ ID NO: 212 - protein, 427 aa, Populus trichocarpa
MGKKEQQLQPQKDHKDNDRGEAVLELLRKHAPLTVKQEKFCNNACVERFLRAKGDNVKKAAKHLRACLSWRESIGTENLIADEFSAELAEGVAYVAGHDEESRPVMIFRIKQDYQKFHSQKLFTRLLVFTLEVAIGTMPRNAEQFVLLFDASFFRSASAFMNLLLGTLKIVAEYYPGRLYKAFVIDPPSLFPYLWKGVRPFVELSTATMVVSSLDFEESLEFNDFSSYPRASSLRLDPSSVKSTAKIGSCSSSRFSFTVSHHFDSLKPWHLTLTDTSASKVGPTNLSSLGPALISPLNARSFSFASPVARTPRGSMNGGSYTRLAQKSLFPSTPLPQRVTTSDTLKISQPRTPRPSFLQSPALFFKKECHVSKADRSRESFVPFLKFYRRPYDEMIYRSKMRPPLGGLISIVSPHIKRRHMSVSQRF

SEQ ID NO: 213 - DNA, 1314 bp, Zea mays
atggccatcgacaaggtggacgccaaggagagggagaagatcgaggccgtacgcaagctgctgtgcaagcaggcgccgctctccgcgaagcaggcgcagtactgcaacgacgcgtgcttggagcggttcctgcggtcgcggggggacagcgtcaagaaggcggcgaagcacctgaggaccgtcctctcatggagggagagcgtcggagctgatcacatcatggccgacgagttctccgccgagctcgccgacggcgtggccttcgtctccggccacgacgacgacggccgcccagtcgtggtgtttcgaatcaagcaggactaccccaagttccactctcagaaatcgttcgtgcgcctgctggtgttcacgctggaggtggccgtggcgtgcatgtcccggttcgtggaccagttcgtcgtcctcttcgacgcaagctttttccgctcggcgtcggctttcctcaacctactcatgggcacgctcaagatcgtcgccgactactaccccggccgcctccaccgcgccttcgtcatcgacccgccctccctcttctccgtcctctggaagggggtgcggccgttcgtggagctggcgccagcgacggcggtggtgtgctccctggacttcgaggactcgctcgaggacgcgtctttcacggcgtacccgcggaccgcgtcgctgcggttcgagccggcggccgtcgtggggaagaacccgggcgtggggtcggtctcgtcgcggttctccgtcacccccaccgacaaccccatcaagccgtggtacctctccaccatccccacctcggtgggctcccgctccgtggtgcccacctccagcagcccgtcgctggtcggcgcgtccccgctctccgcgcgctccttctccttcgcctcgcccgccacgctgcgctccacggtcgccacgccgccgccgttcccgcgcggcgcgggcgcgcccctgacgccgtcctccgccgccaaggcccagaagaccccgccgcagccgcagcagttcccgcggacgccgcgcccgtcgttcctgcagtcgccgtcgatgctgttcgcgttccggaaggacgggcaggccagccgcgtggagcgcgagcgcgagtccttcctcccgtacctgcgcttctaccgccggccctacgacgagatttcctaccgcgccaagatgcgccccccgctcggcggcctcatatccatcgtcggcgacaagttcaggcagaagccggtgccgcagccgcagccgctgcgtcgccacgctgggctccaccaccagcaccattaccagcagcagcagaggatctga

SEQ ID NO: 214 - protein, 437 aa, Zea mays
MAIDKVDAKEREKIEAVRKLLCKQAPLSAKQAQYCNDACLERFLRSRGDSVKKAAKHLRTVLSWRESVGADHIMADEFSAELADGVAFVSGHDDDGRPVVVFRIKQDYPKFHSQKSFVRLLVFTLEVAVACMSRFVDQFVVLFDASFFRSASAFLNLLMGTLKIVADYYPGRLHRAFVIDPPSLFSVLWKGVRPFVELAPATAVVCSLDFEDSLEDASFTAYPRTASLRFEPAAVVGKNPGVGSVSSRFSVTPTDNPIKPWYLSTIPTSVGSRSVVPTSSSPSLVGASPLSARSFSFASPATLRSTVATPPPFPRGAGAPLTPSSAAKAQKTPPQPQQFPRTPRPSFLQSPSMLFAFRKDGQASRVERERESFLPYLRFYRRPYDEISYRAKMRPPLGGLISIVGDKFRQKPVPQPQPLRRHAGLHHQHHYQQQQRI

SEQ ID NO: 215 - DNA, 4638 bp, Glycine max
atgacgtctcggcagctgcactctacaatgctttactttgtctttctgtctgcaccagtgaatattattgtaggttctcatgtctggattgaagatccagcacaagcatggattgatggagaagtttctaaaatcaatggtgaagaagtccatgttcgcaccacagatggaaaaacagttgtcaaaaatatctcaaaggtttttcccaaggataatgaagcccctcctggtggtgtagatgacatgacaaaattgtcttacttgcatgaaccaggagttctgcacaatttggcaactagatatgaactcaatgaaatctatacatatactggaaatatcttgattgcaataaatccttttcaaagattaccgcatctatatgatactcacatgatggaacaatacaaaggagctgcatttggagaattgagtccccatgtttttgcagttgcagatgttgcatacagggcgatgattaatgagggaaaaagcaactcaatcctggttagtggtgagagtggggctggaaagacagagacaacaaaaatgcttatgcggtatcttgcatatcttgggggccgatctggagtagaaggaaggacagttgaacaacaagttctagaatctaatccagttcttgaagcatttggcaatgccaaaacagttagaaacaacaactcaagtcgttttggaaaatttgttgagatacaatttgacaacaaaggaagaatctctggggcagctatacggacatatttgcttgaaagatcccgtgtctgtcaactttcggatcctgaaagaaattaccattgtttttaccttctctgtgcagcaccagctgaggaaaaagagaagtataagctgggaagtcctagctcctttcattacttaaatcaatccaaatgctatgcgctggatggagtggatgatgctgaagaatatcttgcaactcgaagggcaatggatgttgttggaatcagtgaggaggagcaggaggctatttttagggttattgcagcaattttgcaccttggaaatattgaatttgcaaaaggagaggagattgactcttctgtcatcagggacgagaagtctaggttccatcttaatgtaacagctgaacttctaaagtgtgattgtaagagcttggaagatgcactgatcaagcgtgtgatggtaacaccggaggaggttattacaagaacccttgatcctgttgcagctcttggtagcagggatgcattagctaaaaccatttattcccgtttgtttgattggctagtggagaagattaacaattcgattggtcaagatcctaattcaaaatctattattggagttcttgatatctatgggtttgaaagttttaagttcaatagttttgagcagttctgtattaattttacaaatgagaagctgcaacaacattttaatcagcatgtctttaaaatggaacaagaagaatacaccaaagaagagatcgattggagttacatagagtttgttgataaccaagatgttttggatctaattgagaagaaacctggaggaataattgcacttcttgatgaagcctgtatgtttccaaagtctacacatgaaactttttctcagaaattgtaccagacattcaaaaacaacaagcgcttcatcaaacctaaactttctcggactagttttacaatatcccattatgcaggggaggtgacatatctagctgatatgtttcttgacaaaaacaaggattatgtggtggcagaacatcaggatctgctcatagcctcaaagtgctcatttgtggctggtctattccccccttctccagaggagtcttcaaaatcatcaaagttctcttcaataggatctcgcttcaagctgcaacttcaatctttgatggagaccctgaattcaacagaacctcactatatcagatgtgtgaagccgaataatgttctcaagcctgctatttttgaaaatctcaatattatccaacaattgcgctgtggtggtgttcttgaggcaattagaatcagctgtgctggatatcctaccagacggaccttttatgaatttcttaacagatttggtgttcttgcccctgaagttctggacggaaactatgatgacaaggttgcgtgccaaatgatcctggataaaatgggtatgaaaggctatcagataggcaagacaaaggttttcttaagagctggccagatggctgaattggatgcaagaagagcagaggttcttggaaatgctgctagaatcatccagaggcaagtacgtacccatattgcacgcaaggagttcattgaattgcgccgagctgcaatttgcttgcaatctaatttacgaggaatattgtcccggaaactttatgagcagttgcgacgtgaagcaggagctgtaaaaatacaaaagaacttcaaaggatacattgccaggaaatcatacttaacagggcgatcatctgcagttatactgcaaacaggtttaagggctatgaaagctcgtgatgaatttagatttagaaagcaaacgaaggctgcaatttacatccaggcttatttgcgtcggctaattgcatattcatattataaaagattgcaaaaggctgcagttgttactcaatgtggttggaggagaaggattgctagaagggaacttagaatgcttaaaatggctgctagagaaacaggggccctcaaagaagctaaggacaaactagaaaagcgtgttgaagaacttacttggcgtttgcaaattgagaaacgtttgagaactgatttggaagaggaaaaggcacaagaaattgctaagttacaggaagctttacatgcaatgcaaatacaagtagaagaagcaaataccaaggtcatcaaagagcgcgaggcagcacgaaaggccattgaagaagcacctccagttgttaaggagactcctattataattcaagatactgaaaagattaattcattattggctgaagtcaatagtttgaaggaatcactcctattggaaaaagaggctaaagaagaggccagaaaagctcaggctgaggctgaagctagaaataaagagatggttaaaaaggttgaagattctgaccgcaaagtggatcaacttcaagaattggttcagagattggaggaaaagatttccaatgcagagtcagaaaatcaagttcttcgccagcaagcactggctgtatcaccaactggaaaaactctgtctgcaagaccaaggacagtgattattcagaggacacccgaaaatgggaatgctctaaatggtgaagcaaaaattggatcggatatgactcttgctgtatccaatgtgcgtgagcctgaatctgagggaaaaccacaaaaatctctcaatgagaagcagcaagaaaaccaggacttattgatcaagtgcataacacaagatttgggattttctgggggcaaacctgttgctgcatgtgtcatatataaatgccttctccactggaggtcatttgaagttgaaaggactagtgtattcgaccgtatcattcaaacaatagcttcagctgttgaggcccaggataatactgatgttttagcctattggttgtctaatacatctactttgttgttgctactccaacgcactcttaaagctagtggagctgctagcttaacaccacagcggcggagaacagcatcatcttctctgtttggaagaatgtctcaagggctaagggcgtctccccaaagtgctggattgtcatttctaaatggtcgaggtcttaatagactggatgatttacgacaagtagaagcaaaatatccagcactgctgtttaagcagcagcttactgccttccttgaaaaaatatatggaatgataagagacaacctaaaaaaggagatatctccattacttggactttgtatacaggctccaagaaactcgcgtcaaagtctagtaaaaggacgcgcacaggcaaatgcagttgctcagcaagccttaattgctcactggcaaagtattgtgaaaagcttaaacaattatctaaagataatgaaagcaaactatgcgcctcctttcttggtccgaaaagtgttcactcaaatattctcattcatcaatgttcaattattcaatagtcttctgttgcgtcgggagtgttgttcgttcagcaatggggagtatgtaaaaacaggtctggctgaattagagcagtggtgcatcgaggcaacagaggagtatactggctctgcttgggaggaactgaaacatatcaggcaggctgttggattcctggtgatacatcaaaaacccaaaaaatccctgaatgaaattacaaaggagctttgccctgttctcagtatacaacagttatacaggataagtacaatgtactgggatgacaaatacggcactcacagtgtgtctacagacgttataacaaacatgagagctatgatgtctgaggactctaataatgctgtcagcacttctttcctattagatgatgactcgagcattcctttttcggtggatgacatttccaaatcaatgcacccagtagaagtagcagacgtggatcctcctccgttgatacgtgagaactcagggtttgggttcttactagcacggtcagagtga

SEQ ID NO: 216 - protein, 1545 aa, Glycine max
MTSRQLHSTMLYFVFLSAPVNIIVGSHVWIEDPAQAWIDGEVSKINGEEVHVRTTDGKTVVKNISKVFPKDNEAPPGGVDDMTKLSYLHEPGVLHNLATRYELNEIYTYTGNILIAINPFQRLPHLYDTHMMEQYKGAAFGELSPHVFAVADVAYRAMINEGKSNSILVSGESGAGKTETTKMLMRYLAYLGGRSGVEGRTVEQQVLESNPVLEAFGNAKTVRNNNSSRFGKFVEIQFDNKGRISGAAIRTYLLERSRVCQLSDPERNYHCFYLLCAAPAEEKEKYKLGSPSSFHYLNQSKCYALDGVDDAEEYLATRRAMDVVGISEEEQEAIFRVIAAILHLGNIEFAKGEEIDSSVIRDEKSRFHLNVTAELLKCDCKSLEDALIKRVMVTPEEVITRTLDPVAALGSRDALAKTIYSRLFDWLVEKINNSIGQDPNSKSIIGVLDIYGFESFKFNSFEQFCINFTNEKLQQHFNQHVFKMEQEEYTKEEIDWSYIEFVDNQDVLDLIEKKPGGIIALLDEACMFPKSTHETFSQKLYQTFKNNKRFIKPKLSRTSFTISHYAGEVTYLADMFLDKNKDYVVAEHQDLLIASKCSFVAGLFPPSPEESSKSSKFSSIGSRFKLQLQSLMETLNSTEPHYIRCVKPNNVLKPAIFENLNIIQQLRCGGVLEAIRISCAGYPTRRTFYEFLNRFGVLAPEVLDGNYDDKVACQMILDKMGMKGYQIGKTKVFLRAGQMAELDARRAEVLGNAARIIQRQVRTHIARKEFIELRRAAICLQSNLRGILSRKLYEQLRREAGAVKIQKNFKGYIARKSYLTGRSSAVILQTGLRAMKARDEFRFRKQTKAAIYIQAYLRRLIAYSYYKRLQKAAVVTQCGWRRRIARRELRMLKMAARETGALKEAKDKLEKRVEELTWRLQIEKRLRTDLEEEKAQEIAKLQEALHAMQIQVEEANTKVIKEREAARKAIEEAPPVVKETPIIIQDTEKINSLLAEVNSLKESLLLEKEAKEEARKAQAEAEARNKEMVKKVEDSDRKVDQLQELVQRLEEKISNAESENQVLRQQALAVSPTGKTLSARPRTVIIQRTPENGNALNGEAKIGSDMTLAVSNVREPESEGKPQKSLNEKQQENQDLLIKCITQDLGFSGGKPVAACVIYKCLLHWRSFEVERTSVFDRIIQTIASAVEAQDNTDVLAYWLSNTSTLLLLLQRTLKASGAASLTPQRRRTASSSLFGRMSQGLRASPQSAGLSFLNGRGLNRLDDLRQVEAKYPALLFKQQLTAFLEKIYGMIRDNLKKEISPLLGLCIQAPRNSRQSLVKGRAQANAVAQQALIAHWQSIVKSLNNYLKIMKANYAPPFLVRKVFTQIFSFINVQLFNSLLLRRECCSFSNGEYVKTGLAELEQWCIEATEEYTGSAWEELKHIRQAVGFLVIHQKPKKSLNEITKELCPVLSIQQLYRISTMYWDDKYGTHSVSTDVITNMRAMMSEDSNNAVSTSFLLDDDSSIPFSVDDISKSMHPVEVADVDPPPLIRENSGFGFLLARSE

SEQ ID NO: 217 - DNA, 3417 bp, Medicago truncatula
atgactctccgcaagggttccaaggtttgggttcctgacagggattccgcttggcttcctgctgaagtcctcgaatcttccaataaacaacttcgcgttcaaaccgatttcagcaacaagattgttgttgttgctccggagaaactgtttccgagagatgcggatgaagatgaacacggtggagttgaagatatgacgagattgatttatttgaatgaaccaggggttttgtataatattcggagaagatatttgaataatgatatttatacatacacggggagcattttaatagctgtcaatccattcacaaagcttcctcatttgtacaataaccatatgatggagcagtataagggagctccatttggtgagctcagtccacatgtatttgccgttgctgatgcatcatatagagcaatggtgaatgaaggtcaaagccaatctatcttggtcagtggtgaaagtggtgctgggaaaactgagacaacaaaattgattatgcagtatcttacctttgttggtgggcgtgctgtttgtgatgatagaacagttgaacaacaagttcttgaatcgaatccgcttttagaggcatttggcaatgcaaggaccgtcaggaatgacaattcaagccgttttgggaagtttgctgaaattcagtttgattcaagtggtaaaatatctggtgctgcaattagaacttacttattggaaagatcacgagtagtgcagactacggatccagaaagaaattatcactgcttttatcagttgtgtgcatctgaaagggatgtagagaagtacaagttaggacatccaagccacttccactatttaaatcaaagtaaagtttatgaactagatggggtaagcagcgcagaagaatacataaagacgagaagatcaatggatattgttggcatcagtcacgaggatcaggacgccatatttcgcaccttagccgcaatcttacatctgggaaatgttgaattttttcctgggaaagaacacgactcgtcaataataaaggatgagaaatcaatatttcacttgcagatggctgctaaccttttcaagtgtgatctgaacctactgcgagcaacattatgcactcgttcaatacaaacccgtgaaggaaatattgtcaaagctctggattgtaatgccgctgttgctggcagggatgttttggcgaaaaccgtctatgctcgtttgtttgattggcttgttgataagattaataaagcggttgggcaagatatcaattccaggatgcaaattggaatattggatatatatggttttgagtcttttaaggataacagttttgagcaattctgcatcaattttgcaaatgaaaagcttcagcaacattttaatgagcatgtgttcaagatggagcaagaagagtataaaaaagaagaaattgagtggagttacattgaatttatagacaaccaagatgttttagatttgattgaaaagaagcccattggtatcattgccctgttagatgaagcttgcatgtttccaaaatcaacgcacgaaacattctcaaccaagttgtttcagcacttcttgtcccacgctaggtttggaaaggagaagttttcagaaacagattttactgtttctcattatgctggaaaggtcacataccatacagacacttttttagacaaaaatcgtgattatgtagttctagagcattgcaatgtattatcttcctcaaaatgccccttcgtgtcgagtctctttccttctttaccagaagaatcctcaaggtcatcctacaagttttcttctgtggcttccagatttaagcaacaacttcaagcacttatggaaacacttaagacaacagagcctcattatattcgatgtgtcaagccaaattcttcgaacctaccacaaaagtttgaaaatacaagtgtcttgcatcaattacgctgtgggggtgtacttgaggctgttcggataagtctggcaggttacccaactcgaaggacttactcggagtttgtagatcgatttggattaatagctcctgaatttatggatggaagttatgatgatagagctacaactcagaaaatattgcaaaagctaaagcttgagaattttcagctgggtaggactaaagtgtttctcagggctggtcaaattggtattttagactctaggcggtctgaagttttggacaatgctgcgaagtttattcagcgtcgactgcgtacatttattgcacacagggatttcatctcaatccgagctgctgctgtttctcttcaagcatgctgcaggggttgccttgcacggaagatatatgcttctaaacgggagactgcagcagctatctctattcagaagtatattcgtatgtgtcagatgaggtgtgcttacatgacactgtattcttctgctatcatcatacaatcaaatgttcgtggtttcacaattcgccaaaggtttttgcatagaaaagaacacaaagctgctactattattcaggcgtattggaggatgtgcaaggttcggtatgctttcaaacaacttcaattttcaattgtggcaatacaatgcctttggcgctgtaaacaagcaaaaagacagctccgcagactgaaacaagaggctcgtgaagctggtgccttgcgtttagctaagactaatctggagaaacaattggaagagctcacatggcgtttgcatcttgaaaaaaaaaaaagggtttctaatgaagaggctaagcaaattgagatttccaaacttcaaaagatgctggaagctctgaattgtgaattggatggagctaaattggcaactattaatgagtcgaataagaatgcaattttacaaaatcaattacaattatcagcacaggaaaaatctgctttagaaagagaactagttgcaatgaatgaagtgcaaaaggaaaatgctctgctgaagggctctttggatgccatggaaaagaagagcacagctttggagcttgagcttttgaatgctaaaaaagaccataatgaaaccattcagaaaatgagggaatttgaacagaagagtgctcaactagcacaaaatatgaaaagtcttgaagaaaagctatcgagtttggagaatgaaaatcaggtgcttcgtcagaaagccttaagtgtatctcctaagagtaatcatccaggttttgcaaagtcatcatccgaaataaagtcaagggcaatagccccacacattgagcaaaacccagtatttgaatcacctacacccacaaaacttatgtcctctttgacacgtggcttgtcagattctcgtcgatctaaattaacagcagaaaagcatcaggcattactcttgtttcccttgttccgaaatcctacacttttagtttttggcattctgccggaaattgggaaataa

SEQ ID NO: 218 - protein, 1138 aa, Medicago truncatula
MTLRKGSKVWVPDRDSAWLPAEVLESSNKQLRVQTDFSNKIVVVAPEKLFPRDADEDEHGGVEDMTRLIYLNEPGVLYNIRRRYLNNDIYTYTGSILIAVNPFTKLPHLYNNHMMEQYKGAPFGELSPHVFAVADASYRAMVNEGQSQSILVSGESGAGKTETTKLIMQYLTFVGGRAVCDDRTVEQQVLESNPLLEAFGNARTVRNDNSSRFGKFAEIQFDSSGKISGAAIRTYLLERSRVVQTTDPERNYHCFYQLCASERDVEKYKLGHPSHFHYLNQSKVYELDGVSSAEEYIKTRRSMDIVGISHEDQDAIFRTLAAILHLGNVEFFPGKEHDSSIIKDEKSIFHLQMAANLFKCDLNLLRATLCTRSIQTREGNIVKALDCNAAVAGRDVLAKTVYARLFDWLVDKINKAVGQDINSRMQIGILDIYGFESFKDNSFEQFCINFANEKLQQHFNEHVFKMEQEEYKKEEIEWSYIEFIDNQDVLDLIEKKPIGIIALLDEACMFPKSTHETFSTKLFQHFLSHARFGKEKFSETDFTVSHYAGKVTYHTDTFLDKNRDYVVLEHCNVLSSSKCPFVSSLFPSLPEESSRSSYKFSSVASRFKQQLQALMETLKTTEPHYIRCVKPNSSNLPQKFENTSVLHQLRCGGVLEAVRISLAGYPTRRTYSEFVDRFGLIAPEFMDGSYDDRATTQKILQKLKLENFQLGRTKVFLRAGQIGILDSRRSEVLDNAAKFIQRRLRTFIAHRDFISIRAAAVSLQACCRGCLARKIYASKRETAAAISIQKYIRMCQMRCAYMTLYSSAIIIQSNVRGFTIRQRFLHRKEHKAATIIQAYWRMCKVRYAFKQLQFSIVAIQCLWRCKQAKRQLRRLKQEAREAGALRLAKTNLEKQLEELTWRLHLEKKKRVSNEEAKQIEISKLQKMLEALNCELDGAKLATINESNKNAILQNQLQLSAQEKSALERELVAMNEVQKENALLKGSLDAMEKKSTALELELLNAKKDHNETIQKMREFEQKSAQLAQNMKSLEEKLSSLENENQVLRQKALSVSPKSNHPGFAKSSSEIKSRAIAPHIEQNPVFESPTPTKLMSSLTRGLSDSRRSKLTAEKHQALLLFPLFRNPTLLVFGILPEIGK

SEQ ID NO: 219 - DNA, 4590 bp, Oryza sativa
atggggacgaaagttaatattatagtaggttctcatgtttgggctgaagaccctgaaattgcctgggtcgatggagaagttgttaagatcaaaggtgaagaggccgagatccaagcaaccaatggaaagacgatcaccgcaaatttgtcgaaactgtatcctaaagatatggaagcagctgctggtggagttgatgatatgacaaagctatcctacctccatgagccaggagttctgcagaatttggcaaccagatatgaacttaatgaaatatatacatatacgggaaacattctcatcgccgtcaatcctttccaaagattgccacatttgtatgatccacatatgatgcaacagtacaagggagcaccatttggagagttaagtccacatgttttcgctgtggcagatgttgcatacagagcaatgattcatgaagggaaaagcaactctattcttgtgagtggtgagagcggtgcaggtaaaacagaaacaacaaaaatgcttatgagatatcttgcctatttgggtggccgagctgctaccgagggaagaacagtagagcaacaagttctcgaatcaaatccagtccttgaagcttttggcaatgctaaaactgtcagaaacaacaattctagtcggtttggtaagtttgttgagattcagtttgataagcaagggaggatctcaggtgctgctgtgagaacttacttgctagaaaggtcacgggtgtgccaaatttctgatcctgaacgcaactaccactgcttctatctcctttgtgccgcaccacaggaggaggttgagaagtacaaattaggaaatcctaagacttttcattatcttaatcaatcaaattgctacgagttggttggggttagtgatgctcatgaatacttggctaccagaagagcaatggatattgttggcatcagtactcaggaacaggatgctattttcagggttgttgcagctatccttcatatcggtaacattgagtttgccaagggcaaagaagtcgattcctcagttttgaaagatgacaaatctaagttccaccttgacacaactgctgagcttcttatgtgtgattctggagccttgggagatgctctttgcaagcgtgtcatggtaacaccagaggaggttataaaaaggagccttgatccttacaatgcaactgtcagcagggacggtctagctaagacaatatattcccgcttgtttgactggcttgttgataaaataaacagctcaattggacaagatcctaactctaaatctcttattggtgtcttggatatctatggttttgagagcttcaagttgaacagttttgaacaattctgtattaattatacaaatgaaaaattgcaacaacatttcaatcagcacgttttcaagatggaacaggaagagtataccaaagaacaaattgattggagctatattgagtttgttgataatcaggatgttcttgaccttattgagaagaaacctggtggtgttattgcacttctagatgaggcatgtatgtttcctaagtcaacacatgagactttttcccagaagctgtaccagacatttcaaaagcacaaacggtttgtcaaaccaaagctatctcgcacagattttacaatctgtcactacgctggagaggtgttgtatcaatctgaccaattccttgataaaaacaaagactatgttgtggccgagcaccaggagttactaagcgcttccaaatgctcgtttatctctggactttttcctcctctgccagaggaaacatccaaatcctccaagttctcttcgattggagcacgcttcaagcaacaacttcaagctcttatggaaacactaaactctacagaacctcattatatcagatgtgtcaagccaaacaatgtgctaaaaccggcgatttttgagaatgtcaatgtcatgcaacagttgcgttgtggtggtgtacttgaggcaatcaggatcagctgtgcaggttatcctacacgtcgcacattttatgagtttttgcatcgctttggaatacttgctcaagaggcccttgaaggaaattgcgacgaaaaggttgcatgcaagaggattcttgaaaagaagggtcttgtgggatttcagataggcaaaacaaaagtttttctgagagctggccagatggccgaattagacgctaggagaactgaagtgctcggtgctgcggcaaaaacgattcaagggaaaatacggacacatatcatgcggaagaagttcgttaattggaggaaggcatctatatctgttcaggcaatatggagaggaagattggcttgtaaactgtttgatcaaatgcgaagggtagcagctgccatcaaagttcagaaaaaccaacgtatgcatcaggctaggaggtcctataaacacctaaatgcttcggttcttgtagtgcaaacggcattgcgagcgatggcagcaagaaatacgttcagatacaagaagcagtctaaggcagcagttaaaattcaggcccgttataggtgccatacagctcatgtgtaccataagaagttgaaacgcgcagccattgttgcgcaatgtagatggagaggaaagattgcaaggaaggaactcagaaaacttaaaatggaagctagagaaacaggtgctctcaaggaagcaaaggataaactcgaaaagaaagtggaagaacttacatggcgtgtgcagttagagaagagaatgaggacagacttggaagaagcgaaagcacaggagttgtcaaaactgcagagctctatggaagctctgcaggctaaattggacgagacaagtgcaaagcttgttaaggaaagagaagttgctagggctattgaggaggcacctcctgtagtgcaacaaactgaggttctagtccaggacactgaaaaggttgattccttgacagcagaggtggaagaactcaagacctcactacaatcagaaaaacaaagagcggatgatttggaaaaaaaacgctctgaagaacaacaagcaaatgaagaaaaacaaaagaaaatggaagagactgatgtaaaaatgcgtcaattccaggaatatcttagaaggttagaggagaagctcgctaatgtagaatctgagaataaagtccttcgtcagcaagctgtctcaatggctccaagtaaaattttgtcaggccgttccaagtccattttacagaggaatgcagaaagtgttcatgtatcaagcggcgattcgaaagcagccccagagtccaataacatatcctctcctaaaaaggaatttgacttcgatgataagccacagaagtcacttaatgaaaagcagcaggaaaatcaagatctattaattaggtgcattgctcagcatttgggctttgctggaaatcggccagtcgctgcttgcatcatatacaagtgccttcttcactggagatcatttgaagtagagaggacaagtgtttttgaccgcattattcagaccattggtcatgctattgagacacaggacaacaacgaagtcttagcatattggctctcaaatgcttcaacacttctgctgttgcttcaaaggacactgaaggcaagtggatcaacagggatggctccgcagcgacggagatcgtcatccgccactctttttggaaggatgacccagagcttcagaggaactccccaaggtgtgaatctttctctgataaatgggagcatggttagtggagtagagactctacgacaagtcgaagcaaagtatccggcgttgttgtttaagcagcaacttacggcgtatgtggaaaagatatatggaatgatccgggacaatttgaagaaagagatctctcctttgcttggtttgtgcattcaggcaccaagaacatcaagagcaagcttgatgaaaggatcttcacgttcaaacacaaatacggctgcacaacaagctttgattgctcactggcaagggattgtaaagagccttggaaatttcttgaacatgctgaaattgaacaatgttcctccatttttggtacgaaaggtattcactcagatattctcattcatcaacgtacagctttttaacagtctgctgttgagaagggagtgctgttcgttcagcaatggtgagtatgtaaaagcgggattagctgaactcgagcattggtgctatcgagctaccgatgagtatgcaggttcagcctgggacgaacttaaacatattagacaagctattggtttcctggtgattcatcaaaagccaaagaaaacgttggatgaaataagtcatgacctttgtccagtacttagtatacaacagttatacaggatcagtactatgtactgggatgataagtatggaacacacagcgtgtccccagaggttatatcaaacatgagagtattaatgactgaagactctaacaatcctgtgagcaattcatttcttctggatgacgactcgagtatacctttctccgtcgatgatatatccaaatcgatggagcagattgacatttctgacattgaaccacctccgctcattcgagagaactcaggctttgtatttctgttgccgccccctgaataa

SEQ ID NO: 220 - protein, 1529 aa, Oryza sativa
MGTKVNIIVGSHVWAEDPEIAWVDGEVVKIKGEEAEIQATNGKTITANLSKLYPKDMEAAAGGVDDMTKLSYLHEPGVLQNLATRYELNEIYTYTGNILIAVNPFQRLPHLYDPHMMQQYKGAPFGELSPHVFAVADVAYRAMIHEGKSNSILVSGESGAGKTETTKMLMRYLAYLGGRAATEGRTVEQQVLESNPVLEAFGNAKTVRNNNSSRFGKFVEIQFDKQGRISGAAVRTYLLERSRVCQISDPERNYHCFYLLCAAPQEEVEKYKLGNPKTFHYLNQSNCYELVGVSDAHEYLATRRAMDIVGISTQEQDAIFRVVAAILHIGNIEFAKGKEVDSSVLKDDKSKFHLDTTAELLMCDSGALGDALCKRVMVTPEEVIKRSLDPYNATVSRDGLAKTIYSRLFDWLVDKINSSIGQDPNSKSLIGVLDIYGFESFKLNSFEQFCINYTNEKLQQHFNQHVFKMEQEEYTKEQIDWSYIEFVDNQDVLDLIEKKPGGVIALLDEACMFPKSTHETFSQKLYQTFQKHKRFVKPKLSRTDFTICHYAGEVLYQSDQFLDKNKDYVVAEHQELLSASKCSFISGLFPPLPEETSKSSKFSSIGARFKQQLQALMETLNSTEPHYIRCVKPNNVLKPAIFENVNVMQQLRCGGVLEAIRISCAGYPTRRTFYEFLHRFGILAQEALEGNCDEKVACKRILEKKGLVGFQIGKTKVFLRAGQMAELDARRTEVLGAAAKTIQGKIRTHIMRKKFVNWRKASISVQAIWRGRLACKLFDQMRRVAAAIKVQKNQRMHQARRSYKHLNASVLVVQTALRAMAARNTFRYKKQSKAAVKIQARYRCHTAHVYHKKLKRAAIVAQCRWRGKIARKELRKLKMEARETGALKEAKDKLEKKVEELTWRVQLEKRMRTDLEEAKAQELSKLQSSMEALQAKLDETSAKLVKEREVARAIEEAPPVVQQTEVLVQDTEKVDSLTAEVEELKTSLQSEKQRADDLEKKRSEEQQANEEKQKKMEETDVKMRQFQEYLRRLEEKLANVESENKVLRQQAVSMAPSKILSGRSKSILQRNAESVHVSSGDSKAAPESNNISSPKKEFDFDDKPQKSLNEKQQENQDLLIRCIAQHLGFAGNRPVAACIIYKCLLHWRSFEVERTSVFDRIIQTIGHAIETQDNNEVLAYWLSNASTLLLLLQRTLKASGSTGMAPQRRRSSSATLFGRMTQSFRGTPQGVNLSLINGSMVSGVETLRQVEAKYPALLFKQQLTAYVEKIYGMIRDNLKKEISPLLGLCIQAPRTSRASLMKGSSRSNTNTAAQQALIAHWQGIVKSLGNFLNMLKLNNVPPFLVRKVFTQIFSFINVQLFNSLLLRRECCSFSNGEYVKAGLAELEHWCYRATDEYAGSAWDELKHIRQAIGFLVIHQKPKKTLDEISHDLCPVLSIQQLYRISTMYWDDKYGTHSVSPEVISNMRVLMTEDSNNPVSNSFLLDDDSSIPFSVDDISKSMEQIDISDIEPPPLIRENSGFVFLLPPPE

SEQ ID NO: 221 - DNA, 4041 bp, Physcomitrella patens
atggttacagagaagaagagtcaatctatactagtcagtggagagagtggagcagggaagacagagacaacaaaattgattatgcagtatttggcctacatgggtggtcgagcaaacactgatggacgaaccgtagagcaacaagtccttgagtccaatcctcttcttgaagcttttggaaatgccaagacggttcgcaatgataactcaagtcgattcggtaaattcgtggagattcaattcgacaggagcggtcggatatcaggtgctgctgtgcgtacataccttctggagagatctcgtgttgttcagattgcagaccctgaacggaattaccactgcttttaccagttgtgtgcgtcaccagaggattgtgaaagatataaactcggggacgcaagaagttttcactatttgaatcaaagtgactgtttcgagttaaacggtactaccaatggtcgggaatatgttaaaacacgcagggctatggatgttgtgggtattaaccttgaagagcaggaagccattttccgagtagtagcgtcagtgctgcatctaggaaatattgaatttgtcgcaggatcagattccgacacatcaaagctcaaagatgaccagtccaagttccatctggaggctgctgctgaacttcttcaatgtgaagcgaaaggactgttggattcattatgtacccgagttcttgttacccgtgatggcaatatcacgatgaccttgaatcaggaacaggctaccatcaaccgggatactttggcgaagacaatttactctcgcctgtttgactggttggtggacaaagtaaacagatctattggtcaagatccagattctccgtacttggttggtgtgttggatatctacggatttgaaagcttcaagttcaacagttttgagcagttctgtattaatctggccaatgagaagcttcagcagcatttcaatcagcatgtctttaaaatggagcaagaagagtatacaaaagaggccatcaactggagctacattgagtttgttgacaaccaagatgttctggatctcattgagaagaaaccttctggcattattgctcttcttgatgaagcatgcatgtttcccaagtcaacaaacgagacgttcgctacgaagttgtttcagcagtatagaaaccacaagcggttgactaagcctaagctttctcgcactgacttcacaattaatcattacgcaggagatgttacttaccagactgacttgttcctggataagaacaaagattatgttgttgccgagcatcagttactattgggatcctctagatgctcctttgtcgcaagcctttttcccagctctcccgatcaaggctccaaatcctcgtacaagttcacttccattggcactcgtttcaagcaacaattgggagcgttaatggaaactttgaatacaaccgaaccccactatatccgatgtgtgaaacctaacatggtgcacaagcctggtcgctttgagaatttgaatgtcatccagcagctgcgatgtggaggagtgttggaggccatccgaatcagctgtgcggggtacccatcgcggaggaccttttatgagtttctcgatcgttttgggatgctggcacaagaggttcttgagggaaattacgatgagaaggcggcaatagaacaacttttaaaaaaaatgagtctggagaattatcagcttggccaaacgaaggtgttcttgcgatctgggcaaatggctgaacttgatggcaaaagagctgagatgttgaataatgcagcaaaaactattcaaagacaagtgcgaacctggttagctaaaaggcaattcattgccatgcgaagagccgcagttacaatccaaagatactggcgagggtaccttgctcgtaagcaatatcagaaattgcgtcaagaagctgctgcaacaatgattcaaaagaatgttcggatgtggatcgctcgaagaaaattccttcggatcaaggaggcaattatcagggcacaatctggattccgaggaatgcaatcccgcaagaatgccagattcataagacagacgaaagctgctactcgtattcaggctcattggcgtggatacaaggctagatcagaatacaggaagtgccgaaaaagtgctattacaattcagtgtgcttggaggggcagggttgccagaaatgaactcaagaagcttaaagttgctgctaaagaaacgggtgctctgcaagaagcaaagacgaagctggagaagagatgtgaggagctcacatggcgtctacagctggagaagcgcatgcggacggatatggaggaagccaagaaccaagaaattggaaagttacaagcagcattgaaggaggagcagattcaagcacagaaagccaactcacagttgaccaaggaacttgaagataataagttggctcttggtcaagctgcacaagttataaaagaagtgccaccggtggaagtatttgacgctaaagtggagaagctaacgaaagaaaaccaagaattgcaggccctattggaagatttgaagaaaacagtatcagaatctgaagagaaattcgccaaagctaaagatgaaagtgagcagagactcaagagggcagaacaagcagaagccaaggtcactgagtcacaagaagctcttcagagcttgcaagaaaaattagcgaacatggagtctgagaatcaagttctccgtcaacaaacccttgtgctatcaccgaccaagggcttgtctaatcggttcaagagcactgtgtttcaggaaaatcaagactctttgctgcaatgtgtcatgcaagatgttggcttcaacaatgatcgacctatcgctgcttgtattttgtataagtccttgcttcagtggcgctcttttgaagctgagagaaccaatgtcttcgaccgaatcatccaaacaatcggaactgctattgaaagccaagataacaacgatgtgctggcctactggttatccaatacctctactctgctatttctgttgcaaaaaacacttaaagcaagcggagctgcagggggtgctcctcaaaggcgtcgctctaattctgtgacattgtttggtagaatgacgcaaggattccgtcagtctcctcaaccaggttccgtcacatttggaaatggaggcatcatgggcgggttagatatgtcgcggcaagtagaagccaaataccctgctctgctttttaagcagcaactcactgcatatgtggagaagatttatggcatggtccgcgacaatctgaagaaagagatttctcctttgcttggactatgcatccaagcaccaaggacctcaagggctagtctaggcaaggtttcaaggtcaccaagctcgaacgtgaatgcacagcagacactcagcagccactggcacagtattatctccagccttagttccttgctaagcactatgcgtgccaatcatgctcctcctttccttgttcgcaaactcttcacccagatcttttcgttcatcaatgttcagctgtttaacagtttgctgctgagacgtgagtgttgctcatttagcaacggagagtatgtgaaagctgggttagcagaacttgaacattggatatatgaggccggagtggagtacgctggagcatcttgggatgagctcaagtacatccgacaggcggttggatttttggtcattcatcaaaagccgaagaagtcacttgatgagatcactcatgatctctgcccggtgttaagtgttcagcagctatatcgtatcagtactatgtactgggacgacaagtatggcacccacagtgtctcgccagaggttatagcgaatatgagagttctaatgacagaggattcaaacagtgctgtcagcaactctttcttgttagatgacgattctagtatcccgttctccgtggacgatatatctaagtcaatgcctgaggttgacattgctgaggttgaaccgccaccattgttgaaggataatcctgccttccactttctattgccacaaccagattcctag

SEQ ID NO: 222 - protein, 1346 aa, Physcomitrella patens
MVTEKKSQSILVSGESGAGKTETTKLIMQYLAYMGGRANTDGRTVEQQVLESNPLLEAFGNAKTVRNDNSSRFGKFVEIQFDRSGRISGAAVRTYLLERSRVVQIADPERNYHCFYQLCASPEDCERYKLGDARSFHYLNQSDCFELNGTTNGREYVKTRRAMDVVGINLEEQEAIFRVVASVLHLGNIEFVAGSDSDTSKLKDDQSKFHLEAAAELLQCEAKGLLDSLCTRVLVTRDGNITMTLNQEQATINRDTLAKTIYSRLFDWLVDKVNRSIGQDPDSPYLVGVLDIYGFESFKFNSFEQFCINLANEKLQQHFNQHVFKMEQEEYTKEAINWSYIEFVDNQDVLDLIEKKPSGIIALLDEACMFPKSTNETFATKLFQQYRNHKRLTKPKLSRTDFTINHYAGDVTYQTDLFLDKNKDYVVAEHQLLLGSSRCSFVASLFPSSPDQGSKSSYKFTSIGTRFKQQLGALMETLNTTEPHYIRCVKPNMVHKPGRFENLNVIQQLRCGGVLEAIRISCAGYPSRRTFYEFLDRFGMLAQEVLEGNYDEKAAIEQLLKKMSLENYQLGQTKVFLRSGQMAELDGKRAEMLNNAAKTIQRQVRTWLAKRQFIAMRRAAVTIQRYWRGYLARKQYQKLRQEAAATMIQKNVRMWIARRKFLRIKEAIIRAQSGFRGMQSRKNARFIRQTKAATRIQAHWRGYKARSEYRKCRKSAITIQCAWRGRVARNELKKLKVAAKETGALQEAKTKLEKRCEELTWRLQLEKRMRTDMEEAKNQEIGKLQAALKEEQIQAQKANSQLTKELEDNKLALGQAAQVIKEVPPVEVFDAKVEKLTKENQELQALLEDLKKTVSESEEKFAKAKDESEQRLKRAEQAEAKVTESQEALQSLQEKLANMESENQVLRQQTLVLSPTKGLSNRFKSTVFQENQDSLLQCVMQDVGFNNDRPIAACILYKSLLQWRSFEAERTNVFDRIIQTIGTAIESQDNNDVLAYWLSNTSTLLFLLQKTLKASGAAGGAPQRRRSNSVTLFGRMTQGFRQSPQPGSVTFGNGGIMGGLDMSRQVEAKYPALLFKQQLTAYVEKIYGMVRDNLKKEISPLLGLCIQAPRTSRASLGKVSRSPSSNVNAQQTLSSHWHSIISSLSSLLSTMRANHAPPFLVRKLFTQIFSFINVQLFNSLLLRRECCSFSNGEYVKAGLAELEHWIYEAGVEYAGASWDELKYIRQAVGFLVIHQKPKKSLDEITHDLCPVLSVQQLYRISTMYWDDKYGTHSVSPEVIANMRVLMTEDSNSAVSNSFLLDDDSSIPFSVDDISKSMPEVDIAEVEPPPLLKDNPAFHFLLPQPDS

SEQ ID NO: 223 - DNA, 4467 bp, Populus trichocarpa
atgggaagtaaggagaatataattgtaggttctcatgtttgggttgaagaccatgagttggcttggcttgatgggaaggtatcaaagattactggacaggatgccgagatcgaagcttcaaatgggaagaaggtcacggcaaaattatcgaaaatatatccgaaagatatggaagctcctgctggtggagttgatgacatgacaaagctttcttacttgcacgagcctggagttctggagaacctgaaaacaagatatgagctgaatgaaatctatacgtatactggaaatattcttattgccatcaatccatttcaaagactgccccatctctatgatggtcacatgatgcaacaatacaagggagcaccatttggagagttaagtcctcatgtttttgcggttgctgatgtttcatacagggcaatggtcattgaagggaagagcaattccattttggtcagtggtgaaagtggtgcgggtaaaaccgagaccacgaaaatgcttatgaggtaccttgcatttttaggcggtcgagctgccactgaaggacgaacagttgaacaacaagttcttgaatcaaatccagtccttgaagcattcgggaatgctaaaactgttagaaataacaattccagccgttttggtaaatttgttgagatccagtttgacaagcacggaagaatttctggagctgccatcagaacttaccttctagagagatctcgtgtttgccaagtttccaatcctgagcgcaactaccattgtttttaccttctttgtgccgcaccacaggaggaaatagagaggtataagttggggagcccaaaatcattccactatcttaaccagtcaacttgctttgaactagttggtgtaagcgatgcgcatgactaccttgccacaagaagagctatggatattgttggaataagtgcaagggagcaggaagcaattttcagagttgttgctgcagtccttcatattggaaatattgattttgctaagggaaaggaagttgattcatcggtacctaaagatgatcaatctaaattccatctcaaaacaactgcggagctgctaatgtgtgatcctgttgccttggaagatgcattatgcaagcgtgtcatgatcactcccgaggaggttatcaagcgaagtcttgatcctcaaagtgcggtgattagcagggatggtttagctaagacgatttattctcgtttatttgattgctttgagcagttctgtattaattacacaaacgagaagttgcagcagcatttcaaccagcacgtcttcaaaatggaacaagaggaatacacaaaagagcagattgattggagctacattgagtttgtcgataatcaagatgtcttggatcttattgaaaagaaacctggtgggatagtagctctccttgatgaagcttgcatgtttcccaagtcgacacatgaaacattttcaaacaggctttatcaaacatataaagttcacaagcgctttatcaagccaaaattgtctcgcacggatttcaccattgctcattatgctggagaggtccagtatcaatccgaccactttttggacaagaacaaagactatgtagttcccgaacatcaagatttgttgggtgtttccaaatgtccttttgtagcaggtcttttccctccacttccagtagagacaagcaaatcttcaaagttctcttcgattggttctcgttttaagctacaacttcaacaactaatggaaacattaaattctactgaacctcactacataagatgtgttaagccaaacaatcagctaaaacctgccatatttgagaatatcaatatcatgcagcaattgcgttgtggtggtgttttagaagcaatccgaattagtatggctggataccctactcgtcgccctttctttgaattcgtaaatcgatttggacttcttttccccgaggctttggcaggaagctatgacgaaaaggttgcttgcaaaaagattttggaaaagaagggacttcaagggttccagataggtaaaactaaggtattcttgagagctggtcagatggctgaattggatgcaagaagagctgaggtactcaacaatgcagcaaaaaccatccaggggtgtgtacagacgcactatgctcgtaaaaggtttattgcgttgcggaaggctactgtattggtgcaatcactatggagaggaagactggcttgcaaaatttttgacagaatgaggagggaggcagctgctataaaaattcagaagcatacacgtaaatatgcagccagaacagcctacaagaaacttcatgtatctgcacttgtcgtgcaaacaggtttaagagctatgattgctcgcaaggaattcagatttaggaaacgaactaaagctgcaaccattattcaggcccggaggcgctgtcataaagctgtttcctactataagaggctaaagagaagtgcagttgtcacacaaacaggatggaggtgtagagttgctagaagagagctaaggttgctcaaaatggctgcaagagacaccggcgcactaagagaagccaaagacaagcttgaaaaacatgtagaggaactcacatggcgtttacagctcgaaaaacgattaaggaccgatttggaagaagcaagagcgcaagaggcagtgaaattccagaattcattggaagaaatgaaaattaaaatagaagaagccaatgctttgatagtcaaggagagggaggctgcaaagaatgctattaatgaggcacctcctgtaattaaagaaactcaagtactcgttgaagatactaagaaaattgattctctaacagacgaagtagaaaacctaaaggtcacgttagattatgagaaacaaagagctgatgatactcaaaagaaatacagtgaagtacaagagattagcgaagaaagacgggtgaaattggaagagacggagaaaaaggttcaacaacttcaggaatccttgcaaaggctagaagagaaacttaccaatttagagtcagagaataaagtcctacggcaacaggctctgtccatggcacccaacaagttcctctcaggacgctccagatcagtaatgcagagggttgaaagtcatattccagttgatgctgcaagaacaagtttgagcccttcaatgaaccacagggagcactctgaagtagatgataaaccacagaagtcattaaatgagaaacaacaggagaaccaggagttgctcattcgttgcgtcgcacaacacctaggctttgcagggcatagacctatagctgcttgtatcatatacaagtgccttttgcagtggagatcatttgaagttgagcgaactagtgtgtttgatcggatcatccagaccataggccatgctattgagacccaggataacaatgatagcttggcctattggttatccaatgcctcaacacttctcttactgcttcaacgtacattgaaagcaagtggtgcagcaggaatggctccacagcgtcgacgatcatcatcagctactatatttggaagaatgacacagagtttccgtggagctccacaaggagtcaatctatccttgatcaataatggtggagtggacactttgcggcaagttgaagccaagtaccccgctttgcttttcaagcagcagcttacagcatatgtagaaaaaatttatggaatgattcgggataatctgaagaaagaaatatctcctttgcttggattatgcatccaggcaccaagaacatccagagcaagcttagtgaagggggcacgctcagtagccaacactgcagcccagcaagccctgattgctcactggcaagggattgtgaagagccttggaaacttcttaagcactttgaaatctaatcatgtacccccatttttagttcgtaaggtgttcacgcagatattttccttcatcaatgttcaactattcaacagccttctattaagaagagaatgctgttcatttagcaatggtgaatatgttaaaactgggttggccgaattggagcactggtgttacaacgcaacagatgagtatgcaggttcatcctgggatgagctcaagcatattagacaggctatcgggtttctggttattcatcagaagccgaagaaaactttggatgagataagccatgacctgtgcccggttctaagtatccagcagctataccgtatcagtaccatgtactgggatgacaagtacggcacacacagtgtgtccaccgatgttatatcgaatatgagggtgctgatgacggaagattcgaataatgcagttagcagttctttcctgctggatgatgattcaagcattccattttcagttgatgacttatcaaagtccatggaacaaattgacattgctgacattgaaccaccacctctgattcgcgagaactcgggctttagtttcttgctgccgcgcatcgaataa

SEQ ID NO: 224 - protein, 1488 aa, Populus trichocarpa
MGSKENIIVGSHVWVEDHELAWLDGKVSKITGQDAEIEASNGKKVTAKLSKIYPKDMEAPAGGVDDMTKLSYLHEPGVLENLKTRYELNEIYTYTGNILIAINPFQRLPHLYDGHMMQQYKGAPFGELSPHVFAVADVSYRAMVIEGKSNSILVSGESGAGKTETTKMLMRYLAFLGGRAATEGRTVEQQVLESNPVLEAFGNAKTVRNNNSSRFGKFVEIQFDKHGRISGAAIRTYLLERSRVCQVSNPERNYHCFYLLCAAPQEEIERYKLGSPKSFHYLNQSTCFELVGVSDAHDYLATRRAMDIVGISAREQEAIFRVVAAVLHIGNIDFAKGKEVDSSVPKDDQSKFHLKTTAELLMCDPVALEDALCKRVMITPEEVIKRSLDPQSAVISRDGLAKTIYSRLFDCFEQFCINYTNEKLQQHFNQHVFKMEQEEYTKEQIDWSYIEFVDNQDVLDLIEKKPGGIVALLDEACMFPKSTHETFSNRLYQTYKVHKRFIKPKLSRTDFTIAHYAGEVQYQSDHFLDKNKDYVVPEHQDLLGVSKCPFVAGLFPPLPVETSKSSKFSSIGSRFKLQLQQLMETLNSTEPHYIRCVKPNNQLKPAIFENINIMQQLRCGGVLEAIRISMAGYPTRRPFFEFVNRFGLLFPEALAGSYDEKVACKKILEKKGLQGFQIGKTKVFLRAGQMAELDARRAEVLNNAAKTIQGCVQTHYARKRFIALRKATVLVQSLWRGRLACKIFDRMRREAAAIKIQKHTRKYAARTAYKKLHVSALVVQTGLRAMIARKEFRFRKRTKAATIIQARRRCHKAVSYYKRLKRSAVVTQTGWRCRVARRELRLLKMAARDTGALREAKDKLEKHVEELTWRLQLEKRLRTDLEEARAQEAVKFQNSLEEMKIKIEEANALIVKEREAAKNAINEAPPVIKETQVLVEDTKKIDSLTDEVENLKVTLDYEKQRADDTQKKYSEVQEISEERRVKLEETEKKVQQLQESLQRLEEKLTNLESENKVLRQQALSMAPNKFLSGRSRSVMQRVESHIPVDAARTSLSPSMNHREHSEVDDKPQKSLNEKQQENQELLIRCVAQHLGFAGHRPIAACIIYKCLLQWRSFEVERTSVFDRIIQTIGHAIETQDNNDSLAYWLSNASTLLLLLQRTLKASGAAGMAPQRRRSSSATIFGRMTQSFRGAPQGVNLSLINNGGVDTLRQVEAKYPALLFKQQLTAYVEKIYGMIRDNLKKEISPLLGLCIQAPRTSRASLVKGARSVANTAAQQALIAHWQGIVKSLGNFLSTLKSNHVPPFLVRKVFTQIFSFINVQLFNSLLLRRECCSFSNGEYVKTGLAELEHWCYNATDEYAGSSWDELKHIRQAIGFLVIHQKPKKTLDEISHDLCPVLSIQQLYRISTMYWDDKYGTHSVSTDVISNMRVLMTEDSNNAVSSSFLLDDDSSIPFSVDDLSKSMEQIDIADIEPPPLIRENSGFSFLLPRIE

SEQ ID NO: 225 - DNA, 2598 bp, Triticum aestivum
atgttcttcagcagctcagatgcggaggtgttatgcgaagcaatcaggataagctgtgctgggtatccaactacaagaacattccttgagttcattgaccgtttcggtattcttgcgcctgatgttttgactggaagttctgatgagattactgctgtaagaaagctcttagagaaggtagatctgcaaggttaccaggttggcaagacaaaagtttttcttcgttctggtcaaatggctgaacttgatgctcgtagaaatgaagtgttagggcgttcagctaacatgattcagaggaaagtccgctcgtttttggccaagaagagcttcattgcactacgaagatcagctgtacaaattcagacggtttgtcgcggagagcttgcaagaatagtttaccagggtctccgcagagaagctgcttctctcaaaatccagactagataccgtatgcataatgcgagaaaggcatacactgaactttctgcttccgcgcttaccattcaatcatcgttacgtgggatggctgcacgtaaagagatccacttcagacgtcaaactagagctgctatcattatccagactcgctgccgtcaattcttggcgaggttggattattcaagaacaagaaaagctgctattactacacagtgcatctggagaggaaaagttgctaggaaggagcttcgaaaactcaaattggctgcacgggaaactggcgctttgcaagctgccaaaaataaactggaaaagcaagtcgaagagcttacgtggcgcctacagttggagaagcgcatgcgagctgatcttgaggaatctaaatcacaagagaatgcaaagttgcaagctgccttgcaagaggtgcaacaacagtacaaggaaacaaaagacacgctagtgaaggagagagaggcggccaaaaaggtcgcagagatagagccagttattaaagaggttcccgttatagatacagagctgatgaataagcttcgagatgaaaatgataaacttaagactcttgtcagttctcttgaaaagaagattgatgatactgagaagaaatacgacgaaacaaacaaaatcagcgaggaaagactaaagaaggcaatggatgctgagtcgaaaattgatgatttaaacatggcaatgctaaggcttcaagaaaaaatatccaacatggaaactgatgagaaagtgcaaagacaagcgttgttgagcacgccagtcaggagcatgtctgagcatttgtcgattccaattgttccaaagaacctggagaatggctatcatgaggctgaagagccaaaggaaccccaaagtgcaccccctgcccttaaggattatgggaatggcgatccaaagttgagaaaatcttctgctgagaagcaacaggaaaatgtcgatgcacttattgactgtgtagcaaaaaatcttggctactgtgaggggaagccagttgctgcttttaccatatataaatgtctccttcactggaaatcttttgaggctgagaagaccagtgtttttgaccgtcttattcagttgataggatctgcaatagagaatgaggaggacaatgacaaccttgcctactggctctcaaatacgtctagcttgcttttccttttacaaagaagtctcaaagctgctggtgcacctgggactgtttcacgaaagaaacctcctcagccgacatcgttgtttggtagaatggcccaaggcttgcgctctgcatcctttgccaacatgcacgttgaagcgactgatgttgtgcgccaagttgaggccaagtatcctgcgttgcttttcaagcagcagttgactgcttacgtggagaagatttatggaatcatccgtgataatattaaaaaggaattgtcatctttgatttctttatgcatccaggctccaagaacaatgaaagctagcatgctgcgaatttctggaaggtcatctggtcaaactcagagcaaccactggcagaaaattattgagaacttggatatccttctaaaaattctacaagataaccatgtacccccagttttggctcagaaaatctttacccagatattctcatacatcaatgtacagctattcaatagtctgctccttcgccgtgagtgctgctccttcagcaatggagagtatgtcaaagctggcttagccgagttggaattgtggtgtgcaaaggcaacatccgagtatgcagcatcatcatgggatgaaatcaggcatatcagacaggctgttggctttttggttatattccagaagttcaggatatcttatgatgagatagtccatgacctatgtccgattttgagtgtccaacagctataccgaatttgtacacagtactgggacgacaagtacaatacccaaagcgtatcgtcagatgtccttagtaacatgcgggtcctaatgacggaggattcgaacaatgcagaaagcagctcatttctgttggatgataattcaagcattccattctcagtggaggatatcaccaacgcgatacaggagaaggacttctcggacgtgaaaccagccgaggagctgctcgagaaccccgcgttccagtttttacaggattag

SEQ ID NO: 226 - protein, 865 aa, Triticum aestivum
MFFSSSDAEVLCEAIRISCAGYPTTRTFLEFIDRFGILAPDVLTGSSDEITAVRKLLEKVDLQGYQVGKTKVFLRSGQMAELDARRNEVLGRSANMIQRKVRSFLAKKSFIALRRSAVQIQTVCRGELARIVYQGLRREAASLKIQTRYRMHNARKAYTELSASALTIQSSLRGMAARKEIHFRRQTRAAIIIQTRCRQFLARLDYSRTRKAAITTQCIWRGKVARKELRKLKLAARETGALQAAKNKLEKQVEELTWRLQLEKRMRADLEESKSQENAKLQAALQEVQQQYKETKDTLVKEREAAKKVAEIEPVIKEVPVIDTELMNKLRDENDKLKTLVSSLEKKIDDTEKKYDETNKISEERLKKAMDAESKIDDLNMAMLRLQEKISNMETDEKVQRQALLSTPVRSMSEHLSIPIVPKNLENGYHEAEEPKEPQSAPPALKDYGNGDPKLRKSSAEKQQENVDALIDCVAKNLGYCEGKPVAAFTIYKCLLHWKSFEAEKTSVFDRLIQLIGSAIENEEDNDNLAYWLSNTSSLLFLLQRSLKAAGAPGTVSRKKPPQPTSLFGRMAQGLRSASFANMHVEATDVVRQVEAKYPALLFKQQLTAYVEKIYGIIRDNIKKELSSLISLCIQAPRTMKASMLRISGRSSGQTQSNHWQKIIENLDILLKILQDNHVPPVLAQKIFTQIFSYINVQLFNSLLLRRECCSFSNGEYVKAGLAELELWCAKATSEYAASSWDEIRHIRQAVGFLVIFQKFRISYDEIVHDLCPILSVQQLYRICTQYWDDKYNTQSVSSDVLSNMRVLMTEDSNNAESSSFLLDDNSSIPFSVEDITNAIQEKDFSDVKPAEELLENPAFQFLQD

SEQ ID NO: 227 - DNA, 4590 bp, Zea mays
atgggaactccagttggtatcatcgttggttctcatgtttgggtggaagacccaaatctagcttggatagatggagaagttattagcataaaaaacaatgaagtacatgtgcagacatcgaatgggaaaaaggttaccacagacaggtcaaaagtatttcccaaggatatggaagctccaccaggaggagttgatgatatgacaagactttcatacttacatgaacctggtgttctacagaatcttgctacccgctatgaactgaatgaaatatatacttacacaggcagcattttgattgctgtaaatccatttcaaagattgccacatctttatgatacccacatgatggaacagtacaagggtgcagattttggggaattgagtccccatgactttgctatcgcagatgttgcttacagggcaatggataatgaagggaaaagcaactctatattggtcagtggtgaaagtggtgctgggaagactgagacaacgaagatgcttatgagatatttagcacatttaggtgggcgatctggagtagaaggacgtacagtggaacaacaagttttagagtccaacccagttcttgaagcttttggtaatgctaaaactgtgcgaaataacaactcaagtcgctttggcaagtttgttgagatccaatttgacaagactggacggatctcaggagctgctatcagaacttacttgctggaaagatcacgtgtgtgccaaattaattctccagaaagaaattaccattgcttttattttctttgtgccgcaccacctgagtacactcagaggtacaagctgtctgatcctagatctttccattacctcaatcagtcgagctgtattgaggtggatggaatcaatgatgctgaagagtatttagcaacacgaagagctatggatatagttggaatcaatgaggaagagcaggaaggtatattccgggttgtagctgctgtacttcatcttggaaatataaattttgccaagggaacagaaatcgattcttctgtaatcaaggatgataaatccaggttccaccttaatatcgcagcagaacttttgaaatgtgattgccagaatttagagaaggcgctgataacacgagttatagtcacgcctgaagaagttatcactagaacacttgatcctgcttctgcagttgctagcagagacgcattagctaaaataatatactcccgattgtttgattggattgtggaaaaaattaatgtctcaattggacaggacccaaactcaaaacaattaattggagttcttgatatctatggttttgagagcttcaaagttaacagttttgaacagctatgtatcaattatacaaatgaaaagctgcaacaacattttaaccagcacgtgttcaaaatggaacaagaagagtataccagagaagagataaactggagttacatcgagtttgttgataatcaagatgtgctagacttgatagagaagaaaggtggattgattgcacttctggatgaagcatgtatgtttcctagatctacacatgagacgtttgcgcagaagctatatacaacatttaagaataacaagcggtttgccaagccaaagctttcacgcactgattttacagtagtccattatgctggcgatgtgacataccaggctgattatttcttagacaagaacaaagattatgtagtggctgaacatcaggatctgctgaatgcttcttcatgcctattcgtagctggtttattccctcctctcccacaggagacagcaaagtcttcaaaattttcatccattggatcacgttttaagcttcaacttcaatccctcatggaaactttgagctctaccgaaccccactatattagatgtgtgaagccaaataatctccttaagccagctatttttgagaatacaaatgttatacaacaactaagatgtggaggtgttctcgaagctatcaggatcagctgtgctggatatcccacaagaaaaacattttatgaatttgtcaatcgttttggtgtccttgctcctgaagttttagaagggagcaatgatgataagattgcgtgccaaaagattttggaaaaaatgggtctggagaattaccagattggaaaaacaaaggtgtttctaagagctggacagatggctgatttggatgctcgtagagctgaagtattaggaagagcagcaagaatcatacagaggcaaatacgtacatatattgcaaggaaacagtttgctgagcttaaaagatcagcaacacagctgcaatcttttgtcagaggaaccttggctcgtaagttgtatgagtgcatgaggcaggaagcagcagcagtgaaaatacaaaagaatatgcgacgccacaaagcacgggaatcttatttacaattgcaagcagctgcaatcacattgcagacaggtttaagggcaatgtctgctcgcaaagaattcaggttcagaaaggaaacaaaagctgctgtccacatccaagctcaatggcgccgccacagagactactcacattacaagaatctgcaaggagcagctcttacttaccagtgtgcctggaggcaaaggcttgccagaagggagctcaggaagctcaagatggcggcaagagaaacaggagccctaaaagaggccaaggataaacttgagaagcgtgttgaagaactcacctggcgcttaggattggagaagcgattaaggactgaccttgaggaagcaaaagcccaggaaattgctaagctgcaagagacgttgcatgatatgcagcttcaagttgaagagtcaaaggccatggtagttaaggagagggaagctgctagaaaggcaattgaagaagcacctccagtaattaaagagactcctgtgctagtcgaagacacagaaaagattaactcactgacgaccgaagttgaacaactgaaggctttgctgctaactgaaagacaagcaacagaagctgcaaaaagagaacacgctgaatctgaactgagaaatgaagaactaattaagaaatttgagagcgcagagaaaaagattgagcaacttcaggaaactgtccataggctggaggagaaagcaaccaacatggagtctgagaacaaagtgctccgtcaacaagctgttgcaatttctcctacgtcaaaatcattagctgcatatcctaagtctcctttccagctgaaaactccggagaatgggaatgctctaaatggagaagtgaagtcatcaccagatatcacccctatcttaccaaaccccaaggagcttgaggctgaagagaagccacaaaaatcacttaatgaaaagcagcaggaaaatcaagacctactgatcaagtgtgtatcacaagatctgggattctccagtggcaaacctattgcagcttgccttatctacaggtgtcttctacactggagatcattcgaagttgaaagaactggtgtttttgaccgtattattcaaacaattggctctgctattgagtcccaggacaacaatgacaagttggcatattggctctcgaattcatccacactgctgctgctgctgcaacgaacactgaaaacaactggagcagctggattcactcctcaaaggcgcaggtcatctgctgcatcttttgggagggtgttttcggggatgcgagcctcaccacaaagtgctgggcgtgcttttatgggaagtcgcttgattggaggtctaggtgaccttcgtcaagttgaagccaagtaccctgccctgcttttcaagcaacagctcacagctttccttgagaagatctatggaatgataagagacaatttgaaaaaggagatatctcctttgcttggcctttgcatccaggcaccaagaacatcccgtgcaagcctaattaaagggtcacgttcccaagcaaatgccttagctcagcaaactctgattgcacattggcagagcattgtgaaaatattgacaaattacttgaatgttttaaaagcaaattatgtcccttcagtcttaatcagcaaagtgttcactcaaatcttttcatttattaatgttcagttatttaatagtcttcttcttcgacgggagtgctgttcatttagcaacggagaatatgtgaaagctggattggcagaattagagcagtggtgcatttatgcaacagaagagtatgcaggttcttcctgggaagaattaaaacatattaggcaggctgttggattccttgtgattcatcaaaagccaaagaaaacattgaaagaaatcaccaacgatctgtgccctgtccttagcatacaacagctatatcgaatcagtacaatgtactgggatgataagtacggtacccacactgtttcatcagatgtcatctcaagtatgagagtaatgatgacagaagattctaataacgcggtcagcagttcgttcctgttggatgatgattccagcattccgttttcggtggacgacatctcgaagtcgatgacagaaatcgaggtaacagatgtcgacatgccacctctgatacgggagaattctgggttcaccttcctacaccagagaaaggactaa

SEQ ID NO: 228 - protein, 1529 aa, Zea mays
MGTPVGIIVGSHVWVEDPNLAWIDGEVISIKNNEVHVQTSNGKKVTTDRSKVFPKDMEAPPGGVDDMTRLSYLHEPGVLQNLATRYELNEIYTYTGSILIAVNPFQRLPHLYDTHMMEQYKGADFGELSPHDFAIADVAYRAMDNEGKSNSILVSGESGAGKTETTKMLMRYLAHLGGRSGVEGRTVEQQVLESNPVLEAFGNAKTVRNNNSSRFGKFVEIQFDKTGRISGAAIRTYLLERSRVCQINSPERNYHCFYFLCAAPPEYTQRYKLSDPRSFHYLNQSSCIEVDGINDAEEYLATRRAMDIVGINEEEQEGIFRVVAAVLHLGNINFAKGTEIDSSVIKDDKSRFHLNIAAELLKCDCQNLEKALITRVIVTPEEVITRTLDPASAVASRDALAKIIYSRLFDWIVEKINVSIGQDPNSKQLIGVLDIYGFESFKVNSFEQLCINYTNEKLQQHFNQHVFKMEQEEYTREEINWSYIEFVDNQDVLDLIEKKGGLIALLDEACMFPRSTHETFAQKLYTTFKNNKRFAKPKLSRTDFTVVHYAGDVTYQADYFLDKNKDYVVAEHQDLLNASSCLFVAGLFPPLPQETAKSSKFSSIGSRFKLQLQSLMETLSSTEPHYIRCVKPNNLLKPAIFENTNVIQQLRCGGVLEAIRISCAGYPTRKTFYEFVNRFGVLAPEVLEGSNDDKIACQKILEKMGLENYQIGKTKVFLRAGQMADLDARRAEVLGRAARIIQRQIRTYIARKQFAELKRSATQLQSFVRGTLARKLYECMRQEAAAVKIQKNMRRHKARESYLQLQAAAITLQTGLRAMSARKEFRFRKETKAAVHIQAQWRRHRDYSHYKNLQGAALTYQCAWRQRLARRELRKLKMAARETGALKEAKDKLEKRVEELTWRLGLEKRLRTDLEEAKAQEIAKLQETLHDMQLQVEESKAMVVKEREAARKAIEEAPPVIKETPVLVEDTEKINSLTTEVEQLKALLLTERQATEAAKREHAESELRNEELIKKFESAEKKIEQLQETVHRLEEKATNMESENKVLRQQAVAISPTSKSLAAYPKSPFQLKTPENGNALNGEVKSSPDITPILPNPKELEAEEKPQKSLNEKQQENQDLLIKCVSQDLGFSSGKPIAACLIYRCLLHWRSFEVERTGVFDRIIQTIGSAIESQDNNDKLAYWLSNSSTLLLLLQRTLKTTGAAGFTPQRRRSSAASFGRVFSGMRASPQSAGRAFMGSRLIGGLGDLRQVEAKYPALLFKQQLTAFLEKIYGMIRDNLKKEISPLLGLCIQAPRTSRASLIKGSRSQANALAQQTLIAHWQSIVKILTNYLNVLKANYVPSVLISKVFTQIFSFINVQLFNSLLLRRECCSFSNGEYVKAGLAELEQWCIYATEEYAGSSWEELKHIRQAVGFLVIHQKPKKTLKEITNDLCPVLSIQQLYRISTMYWDDKYGTHTVSSDVISSMRVMMTEDSNNAVSSSFLLDDDSSIPFSVDDISKSMTEIEVTDVDMPPLIRENSGFTFLHQRKD

SEQ ID NO: 229 - DNA, 1629 bp, Brassica napus
atgtcgctgaggccgagcacacgcgcggagctgaggaagaagatatacaagacaggtgtcgatgccgatgaggcgaggcggaggagagaagacaacctcgtcgagattcgaaaaaacaagcgcgaggacagtctcctcaagaaacgccgcgaaggcatgatgctccagcagcagcagcagcctctcggagcagctggtctcgatgccctccagagcgctgccgccgttgagaaacgattggaaggtataccaatgatggtacaaggtgtttattctgaggatcctcaagctcagctagaagctactactcagtttagaaagttgttatctattgagcgcagtcctccaattgatgaggtgatcaaagctggtgttatccctcgttttgttgagtttcttcgaaggcaagaccatccacaactccagtttgaggctgcatgggctttgaccaacgttgcgtcaggaacatcagatcatactcgggttgtgattgaacatggggcggtacctatcttcgttgagcttcttagctctgctagtgatgacgttcgagagcaggccgtgtgggccttggggaatgttgctggagactcgccaaactgcaggaaccttgttctcagctgtggtgctcttgcacccttgctgtctcagttaaacgaaaattcaaagttatccatgctaaggaatgctacatggaccttgtccaacttttgtcgtgggaaaccaccaacaccatttgaagaggtgaagcctgccttgccagttctccggcagcttatttatctgaatgatgaagaagttctcactgatgcatgctgggctctctcctacctttcagatggccccaatgataagattcaggctgtgatccaggcaggtgtctgtccacgacttgtggagcttctgagtcatccatcacctacggttctcattcctgccctccgaaccgttgggaacattgtaaccggtgatgactctcagacacagtttataattgatagtggagtacttccacacctttataatttgcttacgcaaaatcacaagaaaagtatcaaaaaagaagcttgttggacaatctcgaatatcactgctgggaataaagttcagatagaggctgtagttggcgctggtattgtcctccctcttgtgcatttgctccaaaacgcggagttcgatataaagaaggaagctgcgtgggctatttcaaatgctacctcaggagggtctcatgagcagattcagtatttggtagcacaaggctgcatcaagcctctttgtgatcttctaatttgccctgatccgaggatcgtgacagtgtgcttagaggggcttgagaacattctcaagattggtgaggctgacaaggagatggggttaaacggtggagtaaatctctatgctcagatagttgaagaatctgatgggttggacaaaattgaaaaccttcagtcccatgataacaatgagatatatgagaaggctgttaagatcttggagagatattgggctgaggaagaagaggatgagcagattctgccagacggtgtgaatgaaaatccacaacagggcttcagttttgggaataaccagaccgctgctccccctggtggatttaaatttggttga

SEQ ID NO: 230 - protein, 542 aa, Brassica napus
MSLRPSTRAELRKKIYKTGVDADEARRRREDNLVEIRKNKREDSLLKKRREGMMLQQQQQPLGAAGLDALQSAAAVEKRLEGIPMMVQGVYSEDPQAQLEATTQFRKLLSIERSPPIDEVIKAGVIPRFVEFLRRQDHPQLQFEAAWALTNVASGTSDHTRVVIEHGAVPIFVELLSSASDDVREQAVWALGNVAGDSPNCRNLVLSCGALAPLLSQLNENSKLSMLRNATWTLSNFCRGKPPTPFEEVKPALPVLRQLIYLNDEEVLTDACWALSYLSDGPNDKIQAVIQAGVCPRLVELLSHPSPTVLIPALRTVGNIVTGDDSQTQFIIDSGVLPHLYNLLTQNHKKSIKKEACWTISNITAGNKVQIEAVVGAGIVLPLVHLLQNAEFDIKKEAAWAISNATSGGSHEQIQYLVAQGCIKPLCDLLICPDPRIVTVCLEGLENILKIGEADKEMGLNGGVNLYAQIVEESDGLDKIENLQSHDNNEIYEKAVKILERYWAEEEEDEQILPDGVNENPQQGFSFGNNQTAAPPGGFKFG

SEQ ID NO: 231 - DNA, 1596 bp, Glycine max
atgtcgctgaggccgaatgctagaaccgaggttcgccgcaaccgctacaaggtggcggtggacgccgacgagggtcgccggaggagggaggacaacatggtggagatccgcaagagcaagcgcgaagagagcctccagaagaagcgccgcgaaggcctccaagctcagcagcagttccccactcctctccaagccgcctccattgtcgagaaaaagttagagagtcttcctgcgatggttgctggagtgtggtccgatgataacagccagcaactggaagcgaccacgcagtttcggaaactgctttcgattgagcgcagtcctccaattgaggaagttattcaagctggggttgtgcctcgatttgtggagtttcttgttagggaggatttccctcaacttcagtttgaggctgcgtgggctctcacaaacatagcatctggaacttctgagaataccaaggtggtgattgatcatggggcagttccgatatttgtcaagctacttagttcgcccagtgatgatgttcgggagcaggcagtgtgggcattggggaatgttgctggtgactctcctaagtgtcgtgatcttgttctcagccatggtgccctgatcccactgttggcccagttgaatgaacatgcaaaactttcaatgttgagaaacgcgacatggaccctgtcaaacttctgcaggggcaagccacagcctccatttgagcaggtgagggcagcgcttcctgctctagaacgattggttttttccaatgatgaagaagtcttgacagacgcatgttgggcactatcatatctttccgatggaacaaatgacaaaatccaagccgttattgaggctggtgtgtgtcccagactggtgcagctccttctgcacccatccccttcagtgctgattcctgctcttcgcacagtgggaaatattgtgacaggagatgatatgcagactcagactatcatcaatcatggtgcgctcccatgcctcttgagcctgttgacacataatcataaaaaaagtatcaagaaagaagcttgctggaccatttcaaacattacagctggaaacagagatcagatacaggctgttgttgaagctggtttgattgccccccttgtcaatcttcttcaaaatgctgagtttgacattaaaaaagaagctgcttgggcaatctcaaatgctacatctggtggtacccatgagcagatcaagtatctggtgagccagggttgcattaagcctctctgtgatctgcttgtttgcccggacccaagaatcgtcactgtctgtttagaaggacttgagaatattctgaaggttggggaagctgagaagagcatgggtaacagtggagatgtcaacttgtatgcacagatgatagacgaagcagagggattggagaaaattgaaaacctgcagagtcatgacaacaatgaaatatatgaaaaggctgttaaaattcttgagacatattggttggaagacgatgatgagacactacctacaggcgatggtgctcaacctggttttaattttggaaacaatgatgttccagttccatctggtggattcaactttagttga

SEQ ID NO: 232 - protein, 531 aa, Glycine max
MSLRPNARTEVRRNRYKVAVDADEGRRRREDNMVEIRKSKREESLQKKRREGLQAQQQFPTPLQAASIVEKKLESLPAMVAGVWSDDNSQQLEATTQFRKLLSIERSPPIEEVIQAGVVPRFVEFLVREDFPQLQFEAAWALTNIASGTSENTKVVIDHGAVPIFVKLLSSPSDDVREQAVWALGNVAGDSPKCRDLVLSHGALIPLLAQLNEHAKLSMLRNATWTLSNFCRGKPQPPFEQVRAALPALERLVFSNDEEVLTDACWALSYLSDGTNDKIQAVIEAGVCPRLVQLLLHPSPSVLIPALRTVGNIVTGDDMQTQTIINHGALPCLLSLLTHNHKKSIKKEACWTISNITAGNRDQIQAVVEAGLIAPLVNLLQNAEFDIKKEAAWAISNATSGGTHEQIKYLVSQGCIKPLCDLLVCPDPRIVTVCLEGLENILKVGEAEKSMGNSGDVNLYAQMIDEAEGLEKIENLQSHDNNEIYEKAVKILETYWLEDDDETLPTGDGAQPGFNFGNNDVPVPSGGFNFS

SEQ ID NO: 233 - DNA, 888 bp, Gossypium hirsutum
atggactcccttaacttttgtcggggaaagccccagcctccctttgatccggttaaacctgcacttcctgcattgacacaccttattcattcgaatgatgaagaagtcttaactgatgcatgttgggcgctctcatatctttctgatggtacaaatgacaaaatccaagctgttatagaagcaggtgtttgtgggcgtctggtggagctcttgatgcacccatctccttcagtgctaatacctgctcttcgcacagttggaaatattgtcacaggagatgatggtcaaacccagtgtattatcaatcatcaagtgttgccatgccttctaaacctcttgacaaataatttcaaaaagagcatcaagaaggaagcttgttggacaatctcaaatatcacagctggaaataaggagcagatacaggctgtaattgaagctaatattatatctccactggttcatctgcttcaaaatgctgaatttgatatcaagaaagaagcggcatgggccatctcaaatgccacatctggtggtactcatgatcagatcaaattccttgttagtcaaggttgtataaagccattgtgtgatcttcttaactgccctgatccaaggattgtaacagtctgtttagaagggcttgaaaacattttgaaggtaggagaagctgataagaacctgggcactaccggaggagtgaatctctatgcacaaatgattgatgatgctgagggtctggagaagatcgagaatttacagtcccacgataacactgagatttatgaaaaggctgtgaaagtctcgagacatattggtttggaggaggagaatgaaacaatgccgcgggtgatgcctcctcaacaggggtttcctttttggcgggggtga

SEQ ID NO: 234 - protein, 295 aa, Gossypium hirsutum
MDSLNFCRGKPQPPFDPVKPALPALTHLIHSNDEEVLTDACWALSYLSDGTNDKIQAVIEAGVCGRLVELLMHPSPSVLIPALRTVGNIVTGDDGQTQCIINHQVLPCLLNLLTNNFKKSIKKEACWTISNITAGNKEQIQAVIEANIISPLVHLLQNAEFDIKKEAAWAISNATSGGTHDQIKFLVSQGCIKPLCDLLNCPDPRIVTVCLEGLENILKVGEADKNLGTTGGVNLYAQMIDDAEGLEKIENLQSHDNTEIYEKAVKVSRHIGLEEENETMPRVMPPQQGFPFWRG

SEQ ID NO: 235 - DNA, 1575 bp, Hordeum vulgare
atgtcggtgcgcccgagcgagagggccgacgcgcggcggaaccgctacaaggtgacggtggacgccgatgaggggcggcggcggcgcgaggacaacatggtggagatccgcaagaaccgccgcgaggagagcctcctcaagaagcgccgcgaggggctccaggcccaggctcccatacccgccgccggcgtcgagaagaagcttgaaagcttacctgctatggttggtggggtttattcggaggataacaacctgcagcttgaggcaacgacacaattccgcaagttgctttctatagaaaggagccccccaatcgaagaagttatccaatcaggcgttgttcctcgatttgtgcagtttcttactagggaggatttcccccaactccagtttgaagcagcgtgggcactcacaaacattgcgtctggcacatcagagaataccaaggttgtcattgatcatggggcagttccaatatttgtgaagcttcttgcgtctggcagtgatgatgttcgtgagcaggcggtctgggcactgggcaatgttgctggtgactccccaaagtgccgtgaccttgttctcgcaaatggcgcattgatgcctctgctagcacagttgaatgagcatgctaaactctccatgttaaggaatgcgacctggactttatcaaatttctgcagaggaaagccacaaccagcatttgatcagactaagcctgctctgccagcacttgcacgacttatccattccaatgatgaggaagttttaactgatgcatgctgggctctttcctatctctctgatggcaccaatgacaagatccaatctgtgattgatgctggtgtctgtccccgacttgtggagcttctcctccatccatcaccttcagtgcttatacctgcactacgaactgttggaaatattgtcacaggagatgactcacaaactcagtgcatcattgatcatcaagctcttgggtgtctcctcagtctgttgacagaaaatcacaagaaaagcattaagaaagaggcctgctggactgtttcaaatatcactgctggtaacaaagatcagatacaggctgtgattactgctggaattatttttcctttggtgcatctgctgcaaacggctgagtttgatatcaagaaggaggctgcttgggccatctcgaatgctacctccggtggttcccatgaccaaataaagtatttggttagcgagggctgcatcaagccactgtgtgacctcctcctttgcccagatccaagaatcgttacagtttgcttggagggtcttgagaacattctcaaagttggagaaactgataagaatttgggtgcttctggggagggaaatgtctatgcacagatgattgatgaagcagaaggcctggaaaagattgagaacctgcagagccatgataacaatgaaatctatgagaaggctgtgaagattcttgaggcttactggatggaggaggaagatgatgcgatggggacaactatggaagctcccacaggtgttgcctttgactttggccaaggtggcaaccctgatctgaacttgggctga

SEQ ID NO: 236 - protein, 524 aa, Hordeum vulgare
MSVRPSERADARRNRYKVTVDADEGRRRREDNMVEIRKNRREESLLKKRREGLQAQAPIPAAGVEKKLESLPAMVGGVYSEDNNLQLEATTQFRKLLSIERSPPIEEVIQSGVVPRFVQFLTREDFPQLQFEAAWALTNIASGTSENTKVVIDHGAVPIFVKLLASGSDDVREQAVWALGNVAGDSPKCRDLVLANGALMPLLAQLNEHAKLSMLRNATWTLSNFCRGKPQPAFDQTKPALPALARLIHSNDEEVLTDACWALSYLSDGTNDKIQSVIDAGVCPRLVELLLHPSPSVLIPALRTVGNIVTGDDSQTQCIIDHQALGCLLSLLTENHKKSIKKEACWTVSNITAGNKDQIQAVITAGIIFPLVHLLQTAEFDIKKEAAWAISNATSGGSHDQIKYLVSEGCIKPLCDLLLCPDPRIVTVCLEGLENILKVGETDKNLGASGEGNVYAQMIDEAEGLEKIENLQSHDNNEIYEKAVKILEAYWMEEEDDAMGTTMEAPTGVAFDFGQGGNPDLNLG

SEQ ID NO: 237 - DNA, 1686 bp, Medicago truncatula
atgtcgctcagacccaatgcaagaacagaggttcgtcgcaaccgttacaaagttgccgtcgatgccgatgaaggtcgccggagaagagaggataacatggtcgagatccgtaaaagtaagcgtgaagaaagtctcttgaagaaacgtcgtgaaggtcttcaaaatcaaccgcagtttactcctcttcaatcttcctccattgtcgagaaaaagttggagagtcttcctgcaatggttgctggtgtttggtcagatgataataatcaacaacttgaagcaactacgcaatttcggaagcttctttccatagagcgaagccctccgattgaggaagttattcaatctggtgttgttccccgctttgttcagtttctagttcgggaggattttccccaacttcagtttgaggctgcttgggctcttacaaacatagcatccggaacttctgagaatactaaggtggtaattgatcatggggcagtgccgatatttgtgaagctacttagttctccaagtgatgatgttcgggagcaggctgtgtgggcattgggaaatgttgctggtgattcacctaggtgccgcgatcttgttcttagccatggtgccctgatcccgctgttaacccagttgaatgagcaggcaaagctttcaatgctgagaaatgccacatggactctgtcaaacttttgcaggggcaagccacaacctccatttgatcaggtgaggccagcacttccggctcttgagcgtttggttttttcaaatgatgaagaagtcctgacagatgcatgctgggcactctcttatctttctgatggaacaaatgacaaaatccaagcggtgattgaggcaggtgtatgtggcagactagtgcagctccttctgcacccatctccttcagtgctgatccctgcacttcgcacggtgggaaatattgttacgggagatgatgcacagactcaggctattattggtcatggttcactcccatgtcttttgagcctgttgacccataatcacaagaaaagtattaagaaagaagcttgctggactatatcaaacattacagctggaaacaaagagcagatacaggctgttattgaagccggactgattgctcctctggtcaatcttcttcaaaatgccgaatttgacattaaaaaagaagctgcatgggcactctccaatgctacatctggcggtacccatgagcaaatcaagtacttggtgagccagggttgcattaagcctctgtgtgatcttcttgtttgccccgatccaagaattgttaccgtctgtttagaaggtcttgagaatattctgaagattggagaagcagagaaaagctttggtaacgcgggagatgtcaacttgtatgctcagatgatagatgaggcggagggattggaaaagattgagaacctgcagagtcatgacaacaatgaaatttacgagaaggctgttaaaattctcgagacatattggttggaagatgaagacgagacactaccaccaggcgatggttctcaacctggttttaattttggaggcaatgaccttccggtcccatctggaaggaactgtgttggatgcagcagggtactgttggcgttgagtccgggtggggtgggggagggggggcgtcggtctttgtacttcatggtgtctggtgtcagtctggtctag

SEQ ID NO: 238 - protein, 561 aa, Medicago truncatula
MSLRPNARTEVRRNRYKVAVDADEGRRRREDNMVEIRKSKREESLLKKRREGLQNQPQFTPLQSSSIVEKKLESLPAMVAGVWSDDNNQQLEATTQFRKLLSIERSPPIEEVIQSGVVPRFVQFLVREDFPQLQFEAAWALTNIASGTSENTKVVIDHGAVPIFVKLLSSPSDDVREQAVWALGNVAGDSPRCRDLVLSHGALIPLLTQLNEQAKLSMLRNATWTLSNFCRGKPQPPFDQVRPALPALERLVFSNDEEVLTDACWALSYLSDGTNDKIQAVIEAGVCGRLVQLLLHPSPSVLIPALRTVGNIVTGDDAQTQAIIGHGSLPCLLSLLTHNHKKSIKKEACWTISNITAGNKEQIQAVIEAGLIAPLVNLLQNAEFDIKKEAAWALSNATSGGTHEQIKYLVSQGCIKPLCDLLVCPDPRIVTVCLEGLENILKIGEAEKSFGNAGDVNLYAQMIDEAEGLEKIENLQSHDNNEIYEKAVKILETYWLEDEDETLPPGDGSQPGFNFGGNDLPVPSGRNCVGCSRVLLALSPGGVGEGGRRSLYFMVSGVSLV

SEQ ID NO: 239 - DNA, 1605 bp, Oryza sativa
atgtcgctgcggccgagcgagcgggcggaggtgcggcggagcaggtacaaggtggcggtggacgcggacgaggggcggaggcggagggaggacaacatggtggagatccgcaagagccggcgcgaggagagcctcctgaagaagcgccgcgacggcctccccgccgccgccgcggccgccgcggcggcgtccccgctgctcgcccactcctccgcgctccagcagaagttggaggggttgccggcgatggtgcaggcggtgcagtccgacgacagcgccgtgcagctggaggccaccacgcagttccggaagctgctctccatcgagcggagtcctccaattgaggaggtgatcaacacaggggtggtgcctcgctttattgccttcctccaacgtgaggattatccccaactccagtttgaggctgcatgggcactcactaacattgcatcaggcacatcagataacaccaaagtggtagttgagtctggtgctgtgcccatctttgtcaaactgcttagctcccccagtgaggatgtccgtgagcaggctgtatgggctctgggaaatgtggctggtgactcaccaaaatgccgtgacctggtgcttgcaagtggtgggttatacccattgttgcaacagcttaatgagcacgccaagctctcaatgctcaggaatgccacatggacactgtcaaacttctgccgtgggaagcctcagcctaattttgagcaggtcaaaccagcgctttctgcactgcagcgcctcatccattctcaggacgaggaggtcctgactgatgcctgctgggctctttcttatttgtctgatggaactaatgataagatccaagctgtgatagaatcaggagtgttcccaaggcttgtggaacttctcatgcatccttcggcttcagtgctcattccagctttgcgcacggtgggtaacatcgtcactggggatgacatgcagactcagtgtgtcatcgatcatcaagctcttccatgtctcttgaacctcttgaccaacaatcataagaaaagcatcaagaaagaagcatgctggactatctcaaacatcactgctggcaatagggaacagattcaggctgtgatcaatgcaaacataattgctcctctagtacatctgctgcaaactgctgaatttgacatcaagaaagaggctgcgtgggcaatctcaaatgccacttctggtggaacacatgatcagattaagtaccttgttgcccagggttgcatcaagccactctgtgatctgcttgtttgcccagatcccaggatcgtgacagtttgcttggaaggtcttgagaacatcttgaaggttggagaggcagaaaagaaccttggggcaggggatgtcaattcctatgctcagatgattgatgatgctgagggactggagaagattgagaaccttcagagccatgacaacactgaaatatatgagaaggcagttaaaatgctcgagtcctactggttggaggaggaagatgatgccatgccctcaggtgacaacgctcaaaacggcttcaactttggaaaccagcagcccaatgttccatcgggtggattcaactttggctga

SEQ ID NO: 240 - protein, 534 aa, Oryza sativa
MSLRPSERAEVRRSRYKVAVDADEGRRRREDNMVEIRKSRREESLLKKRRDGLPAAAAAAAAASPLLAHSSALQQKLEGLPAMVQAVQSDDSAVQLEATTQFRKLLSIERSPPIEEVINTGVVPRFIAFLQREDYPQLQFEAAWALTNIASGTSDNTKVVVESGAVPIFVKLLSSPSEDVREQAVWALGNVAGDSPKCRDLVLASGGLYPLLQQLNEHAKLSMLRNATWTLSNFCRGKPQPNFEQVKPALSALQRLIHSQDEEVLTDACWALSYLSDGTNDKIQAVIESGVFPRLVELLMHPSASVLIPALRTVGNIVTGDDMQTQCVIDHQALPCLLNLLTNNHKKSIKKEACWTISNITAGNREQIQAVINANIIAPLVHLLQTAEFDIKKEAAWAISNATSGGTHDQIKYLVAQGCIKPLCDLLVCPDPRIVTVCLEGLENILKVGEAEKNLGAGDVNSYAQMIDDAEGLEKIENLQSHDNTEIYEKAVKMLESYWLEEEDDAMPSGDNAQNGFNFGNQQPNVPSGGFNFG

SEQ ID NO: 241 - DNA, 1605 bp, Physcomitrella patens
atgtctctccgtcccaacgcccgtgttgaggtccgcaagaagggtttcaagctggcaatcgatgccgatgaagcacgtagaaagagagaggacaacatggtggagattcggaagagcaagagagaggagagtcttctgaagaagcgtagagatggtatggttaaactgcagcagcagttcatgcccgccgcgcagactggcgctgccgagaagaagcaactggaaagcctccctgccatggttgctggagtttactctgacgaccccgcaacgcagttggaatcaaccacccaattcagaaagcttctctctattgagcgcagtccaccaatcgaagaggttatcgcagcaggtgttgtacctcggtttgtcgagtttctagtcaggaatgacttcccacagttgcagttcgaagctgcctgggcgttgacaaatattgcttccggaacttctgatcacacccgggtggttattgatcacggagctgtgccaattttcgttcagctcctgagttctccgagcgatgacgttcgagagcaggctgtatgggcattagggaatgtagcgggtgactctccaaagtgcagagatcttgttcttaaccatggcgctttgatgcctctgcttgctcagcttactgacaacacgaagttgtcaatgctgcggaatgcaacgtggaccctatccaacttttgtcgtggcaagcctcagccacctttcgagcagtccaagcctgcactcccagctttggagcgactcattcattcaaatgatgaagaagtccttacagatgcatgctgggccctatcttatttgtccgatggaacaaacgacaagatacaggctgtgattgaagctggtgtttgccgacgtctcgtggagctactgctcagccatccatcaccgtccgtgctaattcctgcactgcgcaccgtgggcaacatcgttactggtgacgaccttcagacccagttcatcatcaacaaccaggcccttccttgtctcctggctctcctgaccaacaatcacaagaaaagcattaagaaagaagcttgttggactatttcgaacataaccgcaggaaacaaggatcagattcaggccgtgattgacgcgaacattattccaccgcttgtatctttgctcgccactgctgagtttgacattaagaaagaagcagcttgggctatttcgaatgccacatccggtggaacgcacgatcaaatcaaatacctcgtcaaccagggttgtattaaaccactttgcgacttattgacctgcccagatccgagaattgtaaccgtctcccttgaaggtctggagaatatcttgaaggtcggagagcaggagaaagatcttggaaaaactggtgggatcaacgaatatgctcgctatattgatgaagccgagggcttagagaagattgagaacctccaaactcacgataacaatgaaatttacgagaaggctgtaaagatcttggagacgtactggttagaagaggatgaggagcagaatactgcacctggtacagatggtcaaagcttcgcgttcggttcaagtaatgtcgcaggagctcctcctggcgggttcaactttggctga

SEQ ID NO: 242 - protein, 534 aa, Physcomitrella patens
MSLRPNARVEVRKKGFKLAIDADEARRKREDNMVEIRKSKREESLLKKRRDGMVKLQQQFMPAAQTGAAEKKQLESLPAMVAGVYSDDPATQLESTTQFRKLLSIERSPPIEEVIAAGVVPRFVEFLVRNDFPQLQFEAAWALTNIASGTSDHTRVVIDHGAVPIFVQLLSSPSDDVREQAVWALGNVAGDSPKCRDLVLNHGALMPLLAQLTDNTKLSMLRNATWTLSNFCRGKPQPPFEQSKPALPALERLIHSNDEEVLTDACWALSYLSDGTNDKIQAVIEAGVCRRLVELLLSHPSPSVLIPALRTVGNIVTGDDLQTQFIINNQALPCLLALLTNNHKKSIKKEACWTISNITAGNKDQIQAVIDANIIPPLVSLLATAEFDIKKEAAWAISNATSGGTHDQIKYLVNQGCIKPLCDLLTCPDPRIVTVSLEGLENILKVGEQEKDLGKTGGINEYARYIDEAEGLEKIENLQTHDNNEIYEKAVKILETYWLEEDEEQNTAPGTDGQSFAFGSSNVAGAPPGGFNFG

SEQ ID NO: 243 - DNA, 1614 bp, Populus trichocarpa
atgtcgctgcgaccaggtacacgaacagaggtgaggaagaagtcgtacaagactggagtggatgcagatgaagcaagaaggaggagagaggacaatttactggagatcagaaagaataaaagagaagacaatcttttgaagaaaagaagagaaggtcttttgtttcagtctcaaagtcagcctttgcttgatgctgctcaacatgctgccaatatcgaaaaaaagttggagagtcttccgatgatggtccaaggagtgtggtctgatgatccttccttacagttggaagcaaccactcagtttagaaagcttttatctattgagcgcagtcctcctatagatgatgtaatcaaagcaggtgtggtcccgcggtttgtggaattccttggaaggcacgatctgcctcaactacaatttgaggctgcgtgggctttgactaatgttgcttctggaacatcagagcatacacgagttgtcattgaccatggtgctgttcctatgtttgtgcagcttcttagttctggaagtgatgatgtcagagagcaggcggtatgggccttgggcaatgttgcgggcgactccccaagttgcagggatcttgttcttggtcatggtgctctgatgccattgctagctcagctaaatgagaattcaaaattatccatgcttaggaatgctacctggacattatccaatttttgtcgtggcaagccaccaacaccatttgatcaggtgaagcctgctttgccagttctccagcaacttatccacttgaatgatgaagaagtcttaacagatgcatgctgggcactctcctatctttcagatggtcaaaacgacaaaattcaggctgtgattgatgctggtgtctgtcgacgtctggtggagcttcttcttcatccatcacctacagttcttattcctgcccttcgaacagttggaaacattgttacaggcgatgacggtcagactcagtttgtaattgacaatcaagtcctcccttgtctccaccaacttctcttgcaaaatcacaaaaaaagtatcaagaaagaagcgtgttggacaatctctaatatcacagctggaaatagaactcaaatacaggctgttattgaggccaatattattctccctcttgtaaaccttctgcaacatgcggagtttgacattaagaaggaggctgcctgggctatctcaaacgccacctctgcaggctctcatgaacaaattcaatttctggtgagccagggttgcattaaaccactgtgtgatcttcttatctgcccagaccccaggatcgtgacggtctgccttgaggggctggagaacatccttaaggtgggtgaggctgacaaggaaatgggcttaaatggtggagttaatctgtatgcgcaaatggttgatgaatgtgatggattggataagattgagaatctgcaaactcatgacaacaacgagatttatgaaaaggcagtgaagattttggagagatactgggctgaggaagaagatggagaaccgattgtccaagatggtggggatggaaatcagcaaggttttgcttttggaactaaccagcctagtgttccccaaggtggcttcaagtttgggtga

SEQ ID NO: 244 - protein, 537 aa, Populus trichocarpa
MSLRPGTRTEVRKKSYKTGVDADEARRRREDNLLEIRKNKREDNLLKKRREGLLFQSQSQPLLDAAQHAANIEKKLESLPMMVQGVWSDDPSLQLEATTQFRKLLSIERSPPIDDVIKAGVVPRFVEFLGRHDLPQLQFEAAWALTNVASGTSEHTRVVIDHGAVPMFVQLLSSGSDDVREQAVWALGNVAGDSPSCRDLVLGHGALMPLLAQLNENSKLSMLRNATWTLSNFCRGKPPTPFDQVKPALPVLQQLIHLNDEEVLTDACWALSYLSDGQNDKIQAVIDAGVCRRLVELLLHPSPTVLIPALRTVGNIVTGDDGQTQFVIDNQVLPCLHQLLLQNHKKSIKKEACWTISNITAGNRTQIQAVIEANIILPLVNLLQHAEFDIKKEAAWAISNATSAGSHEQIQFLVSQGCIKPLCDLLICPDPRIVTVCLEGLENILKVGEADKEMGLNGGVNLYAQMVDECDGLDKIENLQTHDNNEIYEKAVKILERYWAEEEDGEPIVQDGGDGNQQGFAFGTNQPSVPQGGFKFG

SEQ ID NO: 245 - DNA, 1590 bp, Solanum lycopersicum
atgtcgttgaggccgaacgccagaaccgaggttcgccggaaccgttacaaagttgccgttgatgccgaggaaggtcgccggagaagagaggacaatatggttgagattcgtaagaataagagagaggagaacttgcagaagaagcgacgtgaaggccttcaagctaatcagcaattttctgttcctgttcagtccactgtcgaaaagaagctcgagaatttaccagcaatggttgccggtgtttggactgaagatggcaatcttcagcttgaagctactactcagtttcgaaaactgctttccatagaaaggagtcccccaattgaggaggtaattcaagcaggtgttgttcctcggtttgttcaatttcttataagggatgactttccacaacttcagtttgaggcagcatgggctctcacaaatattgcttcggggacatctgaacataccaaggtggtgattgaatctggtgcagtcccaatttttgtgaaacttcttagttctccaagtgatgatgtgcgtgagcaggctgtttgggctcttggaaatgttgctggtgattccccaaaatgccgtgatcttgtccttaactgtggagctttgcttcccttgctgtctcagctgaatccaaatgccaagctctctatgttgagaaatgcaacctggacactttcaaatttctgcagaggcaaaccacagcctgcttttgatcagacgaagcctgcacttccagctcttcaacaactaattcattcaaccgatgaagaagttttgactgatgcttgctgggcactttcatatctctctgatggtacaaatgataaaattcaagctgttattgattctggagtatgcccacgattagtcgagttattacttcacccatctccatcggttttgattcctgctcttcggactgttgggaatattgtgacaggagatgatatgcaaactcagtgtatcatcggccatcaggctttgccctgtcttttgaacttgttgagtggtagtcacaagaagagtattaagaaggaagcttgctggacaatttctaacatcacggctggcaaccgggagcaaattcagtgtgtggttgacgctggtattataggtccccttgttaatttgctacaaaatgcggagtttgaaataaaaaaggaggctgcatgggcaatttcaaatgccacatctggtggttcacatgagcagatcaagtaccttgttagtcaaggttgtatcaagccattgtgtgatcttctcatttgtcctgacccaaggattgtcacagtttgtcttgaagggcttgaaaatattttgaaggttggggaagctgagaagagtttgggccggacatcagatataaatctttatgctcagctgattgatgacgctgaaggtttagaaaaaattgagaatcttcaaagccatgacaatcaagagatctatgaaaaggcagttaagattcttgagacgtactggttggaagaagatgacgagaccatgccacctggtgatgcagcccaacaaggttttcagtttggaggtggtgaggtttctgtgccctctggaggattcagctttaactaa

SEQ ID NO: 246 - protein, 529 aa, Solanum lycopersicum
MSLRPNARTEVRRNRYKVAVDAEEGRRRREDNMVEIRKNKREENLQKKRREGLQANQQFSVPVQSTVEKKLENLPAMVAGVWTEDGNLQLEATTQFRKLLSIERSPPIEEVIQAGVVPRFVQFLIRDDFPQLQFEAAWALTNIASGTSEHTKVVIESGAVPIFVKLLSSPSDDVREQAVWALGNVAGDSPKCRDLVLNCGALLPLLSQLNPNAKLSMLRNATWTLSNFCRGKPQPAFDQTKPALPALQQLIHSTDEEVLTDACWALSYLSDGTNDKIQAVIDSGVCPRLVELLLHPSPSVLIPALRTVGNIVTGDDMQTQCIIGHQALPCLLNLLSGSHKKSIKKEACWTISNITAGNREQIQCVVDAGIIGPLVNLLQNAEFEIKKEAAWAISNATSGGSHEQIKYLVSQGCIKPLCDLLICPDPRIVTVCLEGLENILKVGEAEKSLGRTSDINLYAQLIDDAEGLEKIENLQSHDNQEIYEKAVKILETYWLEEDDETMPPGDAAQQGFQFGGGEVSVPSGGFSFN

SEQ ID NO: 247 - DNA, 1230 bp, Triticum aestivum
atgtcgctgcggcccaacgagcgggccgaggtgcggcgcagccgctacaaggcgtccgtcgacgccgaggacgggcgccgccggcgggaggatcagatggtggagatccggaagaatcagcgcgacgcgaacctccagaagaagcgccgcgacgggttcccggccggcgccgcgtccgctgccggtggcgcgccgcagatgggccactcctcggctctccagcagaagctggagggcttgcccgcgatggtgcaggcggttctctcggacgacaacgccgtgcagctcgaggccaccacccagttccggaagctgctctccatcgagcgaagccctccaattgaggaagtgatcaacacaggcgtggtgcctcgcttcattgagttcctcacacgggaggactatccccaactccagtttgaggctgcatgggcgctcaccaacatcgcgtcaggcacatcagacaacaccaaagtggtggttgagtatggtgctgtgcccatctttgtcaagctactcagctctcctagtgaggatgtccgcgaacaggctgtttgggctctggggaatgttgctggtgactctccaaagtgccgtgaccttgtgcttggaagtggtggtctgttccctttgttgcagcagctcaatgagcatgccaagctctcgatgctcaggaatgccacatggacactctccaacttctgccgtgggaaaccacagccaaactttgaacaggtcaaaccggctctctcagcactgcagcgccttatccactctcaggatgaggaggtgctcactgatgcctgctgggctctctcgtacctgtctgatggaactaatgacaagatccaatccgtgattgagtctggtgtttttcctcgccttgtggagcttctcttgcacccttcggcttctgttctcattccagctctgcgcacggtgggtaacattgtcactggtgatgatttgcagactcagtgtgtcattgatcaccaagcacttccctgtctcttgaacctcttgactaccaaccacaagaaaagcatcaagaaagaagcatgctggacaatctcaaacatcacagctggtaaccgggaccagattcaggctgtcatccaggcaaacattattggtcctctggtccatctcctgcaaggtgctgaatttgacattagaaggaggcggcctgggcatttcaaatgccactctggtggacacatgaccagatag

SEQ ID NO: 248 - protein, 409 aa, Triticum aestivum
MSLRPNERAEVRRSRYKASVDAEDGRRRREDQMVEIRKNQRDANLQKKRRDGFPAGAASAAGGAPQMGHSSALQQKLEGLPAMVQAVLSDDNAVQLEATTQFRKLLSIERSPPIEEVINTGVVPRFIEFLTREDYPQLQFEAAWALTNIASGTSDNTKVVVEYGAVPIFVKLLSSPSEDVREQAVWALGNVAGDSPKCRDLVLGSGGLFPLLQQLNEHAKLSMLRNATWTLSNFCRGKPQPNFEQVKPALSALQRLIHSQDEEVLTDACWALSYLSDGTNDKIQSVIESGVFPRLVELLLHPSASVLIPALRTVGNIVTGDDLQTQCVIDHQALPCLLNLLTTNHKKSIKKEACWTISNITAGNRDQIQAVIQANIIGPLVHLLQGAEFDIRRRRPGHFKCHSGGHMTR

SEQ ID NO: 249 - DNA, 1584 bp, Zea mays
atgtcgctgcgtccgagcgagcgggtcgaggtacggcggaaccgctacaaggtggcggttgacgcggaggaggggcggcggcggcgcgaggacaatatggtggagatccgcaagagccgccgtgaggagagcctcctcaagaggcgccgtgaggggctccaggcccaggtccctgcccctccctccggggttgagaagaagcttgaaagcctcccagctatggttagtggggtttattcggatgataataaccttcagcttgaggccaccacacagttccgcaaattgctctctatagagaggagtccccccatcgaagaagttatcaaaacaggtgtagttccaagatttgtgcagtctctcaccagagaggatttcccccagctgcagtttgaagccgcatgggctctcacaaatattgcttctggcacttcagaaaatacaaaggctgttattgaccatggggctgttcctatatttgtgaagcttcttgggtctggtagtgatgatgttcgtgagcaggctgtgtgggctttgggtaatgttgctggcgattctccgaagtgccgcgaccttgttctcgccaatggtgcgttgatgcctctgctagcccagttgaatgagcatgttaagctctccatgctgcggaatgccacctggactttgtctaacttctgcaggggaaaaccacagccatcatttgatcagactaagcctgctctgccagcacttgcacgacttatccattccaacgacgaggaagttctcactgatgcatgctgggccctgtcatacttatctgacggcactaatgataagatccaggctgtgattgaagctggtgtttgcccccggctcgtggagcttctcctccatccatcaccatcggtgcttatacctgctctacgaactgttgggaatattgtcactggagatgatttgcaaactcagtgtattattgatcatcaagctcttccccgcctcgtgaatctgttgacgcagaaccacaagaaaagcattaagaaagaggcatgctggactatttcaaatattactgctggaaacaaagatcagatacaggctgtcataagtgccggtatcatcgctcctttgttgcaactgcttcaaacagcagagtttgatatcaagaaggaggctgcttgggccatctcaaatgctacccctggtggttctcatgagcaaatcaagtacttggtgtctgagggctgcatcaagccattgtgtgaccttcttgtctgccctgatccgagaattgtaacagtttgtctggagggtcttgagaatattcttaaagtagggcagcatgacaagaccatgggtgcaacaggtgacactaatgtcttagctcagatgattgatgaagcggaaggcctggaaaagatcgagaacctacagagccacgataacaatgaaatctatgaaaaggctgtgaagcttcttgagacatactggatggaggaggaagatgacgcaatggctactgccggggaagctgctcctgctgtttttgactttaaccaaggtggcaaccctcctggtgctggtggtctgaacttcaactga

SEQ ID NO: 250 - protein, 527 aa, Zea mays
MSLRPSERVEVRRNRYKVAVDAEEGRRRREDNMVEIRKSRREESLLKRRREGLQAQVPAPPSGVEKKLESLPAMVSGVYSDDNNLQLEATTQFRKLLSIERSPPIEEVIKTGVVPRFVQSLTREDFPQLQFEAAWALTNIASGTSENTKAVIDHGAVPIFVKLLGSGSDDVREQAVWALGNVAGDSPKCRDLVLANGALMPLLAQLNEHVKLSMLRNATWTLSNFCRGKPQPSFDQTKPALPALARLIHSNDEEVLTDACWALSYLSDGTNDKIQAVIEAGVCPRLVELLLHPSPSVLIPALRTVGNIVTGDDLQTQCIIDHQALPRLVNLLTQNHKKSIKKEACWTISNITAGNKDQIQAVISAGIIAPLLQLLQTAEFDIKKEAAWAISNATPGGSHEQIKYLVSEGCIKPLCDLLVCPDPRIVTVCLEGLENILKVGQHDKTMGATGDTNVLAQMIDEAEGLEKIENLQSHDNNEIYEKAVKLLETYWMEEEDDAMATAGEAAPAVFDFNQGGNPPGAGGLNFN

SEQ ID NO: 251 - DNA, 1329 bp, Brassica napus
atgtacggcggagatgaagtgtcagctatagtggttgacttgggctcgcacacttgcaaggctggttacgccggcgaagatgctcccaaggccgtcttcccttccgttgttggggcggtagatggaagtgaggcgatggatgtggatgctgattctgcgaagaacaattcgaactcagaggattcgaagacgaacgagcctgacaaagaaaaggggaaacgtaagctgtatgtgggatctcaggccttgaattaccgccgagatcatatggagatattgtcacccatcaaagatggcatagtttctgattgggatttggtggacaacatttgggaacatgcgttcaggggttgtctgatgattgatcctaaggagcaccccatgctgctagctgagcctcctttaaacacccaacagcagagagagaaggcggcagagctaatgtttgaaaaatacaaagttccagctttgtttatggctaagaatcctgttctcacgtcttttgctactgggcgtgctacttcattggttgtggactgcggtggaggatccacaaccatatcaccggtgcatgagggttatgtccttcaaaaggcggttgtatcagctccaattggaggggagtttctcactgactgcttactgaaaagcttggagagtaaaggaatcaaaataaggcctagatactctttcaagagaaaggaagtacgaccaggggaattccaggttgaggatgtaggtgttcctgacaccacggaaagctacaagctcttctgtcagaggatgatagtgggtgatatcaaggattctatttgtcgtgttcctgatactccttatgacgacaaatcatatgcaaacatcccaactacgtcatacgagcttcctgatggccagacgctcgagatcggtgctgataggttcaagattcctgatgtgatgttcaacccgtcaatagttcagacaattcctgggatggagaagtatggagacatgattcctactgttcgtgggttgccacacatggtcatggagagcatcaacaaatgtgatgtggatatccggagagagttgtatagtagcatactgcttgctggtggcacatcatcgatgcaacaattgaaagaacgcctcgaaaaggacttgatagaagaatctcctcactcggctcgagttaaagtgttggcgagcggtaacacaacagaaagaagattcagtgtatggataggagggagtatattggcatcactgggctcattccaacagatgtggttctccaaatctgagtacgaggaacatggcgcttcgtacattcagagaaagtgcccttaa

SEQ ID NO: 252 - protein, 442 aa, Brassica napus
MYGGDEVSAIVVDLGSHTCKAGYAGEDAPKAVFPSVVGAVDGSEAMDVDADSAKNNSNSEDSKTNEPDKEKGKRKLYVGSQALNYRRDHMEILSPIKDGIVSDWDLVDNIWEHAFRGCLMIDPKEHPMLLAEPPLNTQQQREKAAELMFEKYKVPALFMAKNPVLTSFATGRATSLVVDCGGGSTTISPVHEGYVLQKAVVSAPIGGEFLTDCLLKSLESKGIKIRPRYSFKRKEVRPGEFQVEDVGVPDTTESYKLFCQRMIVGDIKDSICRVPDTPYDDKSYANIPTTSYELPDGQTLEIGADRFKIPDVMFNPSIVQTIPGMEKYGDMIPTVRGLPHMVMESINKCDVDIRRELYSSILLAGGTSSMQQLKERLEKDLIEESPHSARVKVLASGNTTERRFSVWIGGSILASLGSFQQMWFSKSEYEEHGASYIQRKCP

SEQ ID NO: 253 - DNA, 1338 bp, Glycine max
atgtatggcggtgatgaagtatcagctatagtagttgacttgggttcacacacttgtaaagctggttatgctggtgaagatgctcccaaggccgtgtttccctctgttgtgggagcaattgatcaaatggatgttgatgaagcagataatggcgaaaacaactctgcctctgctccggaatcaaataataatgttagaaatgctgattctgacaagaccaagggaaagaggaaattgtatgtaggatcccagtccttggggtaccgtagagaccatatggaggtgctgtctccgtttaaagacgggattgttgctgactgggatattgttgacagcatatgggatcacgccttcagggaatgcctattgattgatcctaaagagcatcctatgcttcttgcagagccttcttctaactctcaacaacagagagaaaggacagcagagctgatgtttgagaagtacaaagcacctgcattgtttttggcgaagaatgctgttctgacttcttttgcatcagggcgtgctacgtcattagttgttgatggtggtggaggatcaattacagttgcaccagtacatgatggttatgttcttcaaaaggctgtggctacctctccaatgggaggagaatttcttacagactgcttgatgaaaagcttggaaagcaagggtattacgataaaaccaaggtattcctttaggagaaaggaaatacgtcctggagagtttcagacagtagatcttgagtttccaaatacaactgaaagctacaaactctattgccagagggtgattgctagtgatatcaaggaatgtgtgtgtcgtgctccagatactccatatgatgagagtgcatattctaacatcccaatgacctcatatgagcttcctgatggccagacaattgaaattggagctgacagatttaagattccagatgttcttttcaatccgtccctggttcagtcaattcctggcacagagagctttgcagaaattgctccttcagttcgtggcctgcctcaaatggtgattgaaagcattaataagtgtgatgtagacattcgaagagagttgtttagtagtatactgcttgctggtggcacagcttcaatgcaacagctaaaggaacgccttgagaaagacttgctagaggagtcccctcaagctgccagagtaaaagtattagccagcggaaatgctactgaaagaaggtttagtgtttggattgggggtagtatattggcatcacttggctccttccagcaaatgtggttctccaaatccgagtatgaagagcatggagcttcatatatccaaaggaagtgtccatga

SEQ ID NO: 254 - protein, 445 aa, Glycine max
MYGGDEVSAIVVDLGSHTCKAGYAGEDAPKAVFPSVVGAIDQMDVDEADNGENNSASAPESNNNVRNADSDKTKGKRKLYVGSQSLGYRRDHMEVLSPFKDGIVADWDIVDSIWDHAFRECLLIDPKEHPMLLAEPSSNSQQQRERTAELMFEKYKAPALFLAKNAVLTSFASGRATSLVVDGGGGSITVAPVHDGYVLQKAVATSPMGGEFLTDCLMKSLESKGITIKPRYSFRRKEIRPGEFQTVDLEFPNTTESYKLYCQRVIASDIKECVCRAPDTPYDESAYSNIPMTSYELPDGQTIEIGADRFKIPDVLFNPSLVQSIPGTESFAEIAPSVRGLPQMVIESINKCDVDIRRELFSSILLAGGTASMQQLKERLEKDLLEESPQAARVKVLASGNATERRFSVWIGGSILASLGSFQQMWFSKSEYEEHGASYIQRKCP

SEQ ID NO: 255 - DNA, 1134 bp, Gossypium hirsutum
atggctgatggtgaggatattcaaccacttgtctgcgacaatggaactggaatggtcaaggctggatttgctggtgacgatgctccaagggctgtgttccctagcatcgtggggcgtccacgtcacactggtgtgatggttggtatgggtcaaaaagatgcatatgttggggatgaggctcagtccaaacgtggtattttaactctgaagtatccgattgaacacggtattgttaacaactgggatgatatggaaaagatttggcatcataccttttataatgaacttcgtgtggctccagaagaacatccggttcttcttaccgaggcacctcttaaccctaaagccaatcgtgagaaaatgacccaaatcatgtttgagaccttcaatgctccggctatgtatgttgctatccaggctgttctctccctatatgccagtggtcgtacaactggtattgttttggactctggagatggggtgagtcatactgtccccatatatgaaggatatgccctccctcatgccatcctccgtctcgacttagcgggtcgtgatcttactgatgcccttatgaaaatcttgactgaacgtggttattcattcaccactacagctgagcgtgaaattgtgagggatgtgaaagagaagctggcatatattgcactcgactatgaacaagagctagaaacttccaaaactagttcttccattgagaagagctacgagttgcctgatggccaagtgatcaccatcggcgctgagcgcttccgatgcccagaagtccttttccaaccttccatgattggaatggaagctgctggcattcatgaaaccacctacaactctatcatgaagtgcgatgtcgacattaggaaggatttgtatggaaacattgttctcagtggtggaactactatgttccctggaattgctgatagaatgagcaaggaaatcactgccttagccccaagcagcatgaaaattaaggtggtggctccacctgaaaggaaatacagtgtctggattggaggctccatcttagcatctctcagtactttccagcagatgtggattgctaaggcggagtacgatgaatccggcccctctattgtgcacaggaagtgcttctaa

SEQ ID NO: 256 - protein, 377 aa, Gossypium hirsutum
MADGEDIQPLVCDNGTGMVKAGFAGDDAPRAVFPSIVGRPRHTGVMVGMGQKDAYVGDEAQSKRGILTLKYPIEHGIVNNWDDMEKIWHHTFYNELRVAPEEHPVLLTEAPLNPKANREKMTQIMFETFNAPAMYVAIQAVLSLYASGRTTGIVLDSGDGVSHTVPIYEGYALPHAILRLDLAGRDLTDALMKILTERGYSFTTTAEREIVRDVKEKLAYIALDYEQELETSKTSSSIEKSYELPDGQVITIGAERFRCPEVLFQPSMIGMEAAGIHETTYNSIMKCDVDIRKDLYGNIVLSGGTTMFPGIADRMSKEITALAPSSMKIKVVAPPERKYSVWIGGSILASLSTFQQMWIAKAEYDESGPSIVHRKCF

SEQ ID NO: 257 - DNA, 1134 bp, Hordeum vulgare
atggctgacgccgaggacatccagcccctcgtctgcgacaatggaaccggcatggtcaaggctgggttcgcaggagatgatgcgccaagggctgtcttcccaagtatcgtgggccgcccacgccacaccggtgtcatggtcgggatggggcagaaagacgcatacgtcggtgacgaggcccaatccaagaggggtatcctcaccctcaagtaccccatcgagcacggtatcgtcagcaactgggacgatatggagaagatctggcatcacaccttctacaacgagctccgtgtcgccccagaggagcaccccgtccttctcactgaggcgccgctcaaccccaaggccaatcgtgagaagatgacccagatcatgttcgagaccttcaacactcctgctatgtatgtcgccatccaggccgtcctctcgctgtatgccagtggtcgtaccacaggtattgtgctggactcgggagatggtgtcagccacactgtccccatctacgaaggatacgctcttccccacgctatcctccgtcttgacctggctgggcgtgatctcaccgattacctcatgaagatcctcactgagcgtggttactcattcaccaccactgctgagcgggaaattgtgagggatgtgaaggagaagctgtcctacattgcactggactacgaccaggaaatggagacttccaagaccagctcttctgtggagaagagctacgagcttcctgatgggcaggttatcaccattggttccgagcgtttccgttgccctgaggtcctcttccagccatccttcatcgggatggaagctgcaggtatccatgagaccacctacaactccatcatgaagtgtgacgtggatattaggaaggatctgtacggcaacattgttcttagtggtggtaccactatgttcactggaatcgctgataggatgagcaaggagatcactgccttggctcctagcagcatgaagattaaggttgttgctcctcctgaaaggaagtacagtgtctggatcggaggatccatcttggcatctctcagcaccttccagcagatgtggattgcaaaggctgagtacgacgagtctggcccatccatcgtgcacaggaaatgcttctaa

SEQ ID NO: 258 - protein, 377 aa, Hordeum vulgare
MADAEDIQPLVCDNGTGMVKAGFAGDDAPRAVFPSIVGRPRHTGVMVGMGQKDAYVGDEAQSKRGILTLKYPIEHGIVSNWDDMEKIWHHTFYNELRVAPEEHPVLLTEAPLNPKANREKMTQIMFETFNTPAMYVAIQAVLSLYASGRTTGIVLDSGDGVSHTVPIYEGYALPHAILRLDLAGRDLTDYLMKILTERGYSFTTTAEREIVRDVKEKLSYIALDYDQEMETSKTSSSVEKSYELPDGQVITIGSERFRCPEVLFQPSFIGMEAAGIHETTYNSIMKCDVDIRKDLYGNIVLSGGTTMFTGIADRMSKEITALAPSSMKIKVVAPPERKYSVWIGGSILASLSTFQQMWIAKAEYDESGPSIVHRKCF

SEQ ID NO: 259 - DNA, 1920 bp, Medicago truncatula
atgtacgatggtgatgaagtttcagctatagtaattgatctgggttcacatacttgtaaagctggttatgctggtgaagatgctcccaaagctgtgtttccttctcgttattattattttgttctttttgtcgttgctgatgatagtgatgaagcgggcactgagattgaggccaattgcaagaaaccttttttgtggatcactaggcctaatcttgtcattggtggctcagtggttttgtcatctgagtttaggaaagaaatttcagatagaggcctaatatcaaattggtgtccacaagagaaagttttgaaccacccttcaatcagcgggttcttgactcactgcggatggaactcaaccaccgaaagcatatgcgctggagtgccaatgttgtgttggtcattttttgctgatcagccaacaaactgtagatttatttgtaatgaatggaagattggtatggaaattgatatgaatgtgaagatagaggatttggagaagcttatcaatgaattgatggtgggagagaatggaaaaaagatgaggcaaaaggccatggagttgaagaaaaaggcagaggagaacactagaccagatgaagtttcagctatagtaattgatttgggttcacatacctgtaaagctggttatgccggtgaagatgctcccaaagctgtgtttccttctgttgttggagcgattgatcaaatggacgtcgatgaatcagatgatgctgaaaagaactctggctctggtgaatcaaagaacaatattagaaatgttgacggtgataaagccaagggaaagagaaaattgtatgtaggatctcagtccttgggctaccgtagagattttatggaggtggtgtctccattaaaggatggaattgttgctgactgggatattgttgacagcatttgggatcatgccttcagggagtgtctactgattgatcctaaagagcatcccatgctccttgcagagccttcttctaatgctcaacaacagagagaaagggcagcagagcttatgtttgagaagtacaaagcacctgcattatttttggcaaaaaatgctgttttgacttcttttgcatcagggcgtgccacatcattagttgttgattgtggtggaggatcaactacagttgcaccggtacatgatggctatgttcttcagaaggctgtggcgacgtctccaattggaggagaatttcttacagattgcttgatgaaaagcttggaaagcaagggtattgcgatgaaacctcggtattcctttaggagaaaagaaatacgccctggagagtttcagactgtagacttggattttcctaatacgtctgaaagctacaagctctattcccagagggtgattgctagtgatatcaaggaatgtgtgtgccgtgctccagatactccatatgatgagagtgcatattcaaacatcccaacgacgtcgtatgagcttcctgatggccagacaattgaaattggagctgacagatttaagattccagatgttcttttcaatccatccctggctcattcaattccgggcatggagagctttgcagaaatcgctccatcagttcgtgggctgcctcaaatggttatcgatagcattaataagtgtgacgtagacattcgaagagaattatttagtagcatactgcttgctggtggcacggcttcaatgcaacaactgaaggaacgccttgagaaagacttgctagaggaatcccctcaggctgctagagtaaaggtattggccagtggaaatgctactgaaaggaggtttagtgtctggattggaggcagtatattggcttctcttggttccttccaacagatgtggttctccaaatccgagtatgaagagcatggagcttcatatatccaaaggaaatgtccttga

SEQ ID NO: 260 - protein, 639 aa, Medicago truncatula
MYDGDEVSAIVIDLGSHTCKAGYAGEDAPKAVFPSRYYYFVLFVVADDSDEAGTEIEANCKKPFLWITRPNLVIGGSVVLSSEFRKEISDRGLISNWCPQEKVLNHPSISGFLTHCGWNSTTESICAGVPMLCWSFFADQPTNCRFICNEWKIGMEIDMNVKIEDLEKLINELMVGENGKKMRQKAMELKKKAEENTRPDEVSAIVIDLGSHTCKAGYAGEDAPKAVFPSVVGAIDQMDVDESDDAEKNSGSGESKNNIRNVDGDKAKGKRKLYVGSQSLGYRRDFMEVVSPLKDGIVADWDIVDSIWDHAFRECLLIDPKEHPMLLAEPSSNAQQQRERAAELMFEKYKAPALFLAKNAVLTSFASGRATSLVVDCGGGSTTVAPVHDGYVLQKAVATSPIGGEFLTDCLMKSLESKGIAMKPRYSFRRKEIRPGEFQTVDLDFPNTSESYKLYSQRVIASDIKECVCRAPDTPYDESAYSNIPTTSYELPDGQTIEIGADRFKIPDVLFNPSLAHSIPGMESFAEIAPSVRGLPQMVIDSINKCDVDIRRELFSSILLAGGTASMQQLKERLEKDLLEESPQAARVKVLASGNATERRFSVWIGGSILASLGSFQQMWFSKSEYEEHGASYIQRKCP

SEQ ID NO: 261 - DNA, 1332 bp, Oryza sativa
atgtacggcggcgatgaggtctcggccatcgtcatcgacgtggggtcctacagctgcaaggcggggtacgccggtgatgacacccccaaggccgtcttcccctcggttgttggttcaattgagcaaacgggagaaactgatgaagcaaaggcagacaaggaggctgaagctgcatcagattctaagaatggagccaaacctatggatgtggacaaagccaagacaaagcgcaaattgtatgttggtcaagaattggagttcaggagggatcatatggaggtgatttcaccaatgaaagatggaacagttactgattgggatattgttgacaatatatggaatcatgctttcaggcagcggctattgatcaatcctgaggagcatcctatgttgatagctgaaccatctacaaacacaggacagcaaagagagaaagcagcagaacttatgtttgagaagtacaaagtgccggcactgttcctagcgaaaaatgcagttctcacatcttttgcatctggacgtgctacatcgttggtagttgacagcggtggtgggtctactgtggttgctgctgttcacgatggttatgtattgcaaaagtctgtggcgacttctccaattggtggtgaatttttaactgactgtatgatgaaaagcttggagagcaagggcgttgttataaggcccaggtattcattcaagaagaaggaagtcggccctggcgaatataaggttgtagatcttgatcttccaaacacaacggagagttacaagttatactgcatgagagctattgctagtgatatcaaggagtcagtttgcagggttccagatactgccttcgatgaagtggcatatgcaaacgttcctacaacttcatatgagcttccagatggacaaaccattgaagttggtgcagacagattcaagattcctgatattctgtttaatccatctctttctcagactattcctggagttgatggatttgcagattcaatgtcagttcgtggccttccacgaatggtcattgatagtgtaaataggtgcgatgttgacattcgcaaggaactgctaagcagtattctgctttcaggtggttcatcatcaattctgcagttgaaggagaggctagaaaaagaagtacttgaggaatcttctggtaatactcgtgtaaaggttttggcaagtggaaattcagtagagaggcgattcagtgtttggattggagggagcattctagcatcccttgggtcgttccagcaaatgtggttctccaaagcagaatacgaagaacatggagtatcctacatccaaaggaagtgcccatga

SEQ ID NO: 262 - protein, 443 aa, Oryza sativa
MYGGDEVSAIVIDVGSYSCKAGYAGDDTPKAVFPSVVGSIEQTGETDEAKADKEAEAASDSKNGAKPMDVDKAKTKRKLYVGQELEFRRDHMEVISPMKDGTVTDWDIVDNIWNHAFRQRLLINPEEHPMLIAEPSTNTGQQREKAAELMFEKYKVPALFLAKNAVLTSFASGRATSLVVDSGGGSTVVAAVHDGYVLQKSVATSPIGGEFLTDCMMKSLESKGVVIRPRYSFKKKEVGPGEYKVVDLDLPNTTESYKLYCMRAIASDIKESVCRVPDTAFDEVAYANVPTTSYELPDGQTIEVGADRFKIPDILFNPSLSQTIPGVDGFADSMSVRGLPRMVIDSVNRCDVDIRKELLSSILLSGGSSSILQLKERLEKEVLEESSGNTRVKVLASGNSVERRFSVWIGGSILASLGSFQQMWFSKAEYEEHGVSYIQRKCP

SEQ ID NO: 263 - DNA, 1317 bp, Physcomitrella patens
atgtacgggggagatgaggtttcggcgatagtgctggaccttggttcacactcctgcaaagcaggttatgcaggtgaagatcaacccaagtctgtattcccatctgtagtaggctcagtggagaccccaggagcggtggtcgatgggggaggagacacagacatggaggctaagaagtctggagaagccgaaaaggctaagtcgaggaaactgtatgctggtgtgcaagctctgggttatcgcagagattacatggaggttgtaccggctatgaaggatggcctcgttgcagattgggatgttgtagaaagtctttgggatcacgctctaagggatcgtttaatgatagacccaaaggagcatccaatgcttctcgcagagccctcattcaacacacaacaacatcgcgaaaaaatggttgaacttatgttcgagaagtacgacgtaccagccctttttctcgccaagaatgcggttttgacatcctttgcatcaggccgagcaacatcgctcgttgtggactgcgggggaggctcaaccaccgtggctgcagtgcatgacggttatgtccttcagaaggctatagttcgatcggcaattggaggggaagttctcacagattgcctccaacgaacattggaagccaaaggcattaagatcaaaccacgtttctcatttaagcgcaaagagatacgtcagggggaatacgagttgatcccactcgatcttccaaacacgacagacagctactacgcttatgcgcagagagctattgtggctgatattaaagaatccatttgccgtgtaccagattcagcttttgatgaaacttcatatgctaatatcccaacaacaccttatgagcttccagacggccagataattgaaattggagctgatcgtttcaagatttcagacattttgttcaatcctactcttattcagacaattcctggcatggagaaattcggcactgaagctggaataccttttaacggacttcctcaaatggtgattgagagcatcaacaaatgtgatgttgatatacggagagagctcttcaacagtgtgatgcttgccggtgggactgcttctatgcatcagatgaaggagaggctagaaaaggatctcatggaagaggcaccacaagctgcacgtgtgaaagtgttggccagcggtaacgtcttggagcgtcgattcagtgtatggattggtggaagtattttggcttcattgggctcttttcagcaaatgtggttctccaaagcagagtatgaagagcatggtcccacatatgttcagagaaagtgcccataa

SEQ ID NO: 264 - protein, 438 aa, Physcomitrella patens
MYGGDEVSAIVLDLGSHSCKAGYAGEDQPKSVFPSVVGSVETPGAVVDGGGDTDMEAKKSGEAEKAKSRKLYAGVQALGYRRDYMEVVPAMKDGLVADWDVVESLWDHALRDRLMIDPKEHPMLLAEPSFNTQQHREKMVELMFEKYDVPALFLAKNAVLTSFASGRATSLVVDCGGGSTTVAAVHDGYVLQKAIVRSAIGGEVLTDCLQRTLEAKGIKIKPRFSFKRKEIRQGEYELIPLDLPNTTDSYYAYAQRAIVADIKESICRVPDSAFDETSYANIPTTPYELPDGQIIEIGADRFKISDILFNPTLIQTIPGMEKFGTEAGIPFNGLPQMVIESINKCDVDIRRELFNSVMLAGGTASMHQMKERLEKDLMEEAPQAARVKVLASGNVLERRFSVWIGGSILASLGSFQQMWFSKAEYEEHGPTYVQRKCP

SEQ ID NO: 265 - DNA, 1326 bp, Populus trichocarpa
atgtacggtggtgatgaagtgtcagctatagtcattgacttgggttctcacacttgcaaagctggttatgccggcgaggacgcacccaaggccgtctttccttctgttgtgggatcaattgatcaaatggatgttgatgacatgacaagcaacgagaagaatgctgctgtagattctaaaaataatgtcaaagattctgagaaagggaagggaaaacgtaaattatttgtaggatctcaggccttagggtttcgtcgggaccatatggaggtgttatccccttttaaggatgggattgttgctgactgggatattgtggatagcatatgggatcatgctttcagggagtgtctattgattgatccaaaggagcatccaatgctacttgcagaaccttcatccaacagtcaacaacagagagaaaggacagcagagcttatgtttgaaaagtacactactcctgcattatttttggcgaagaatgctgttttaacatcttttgcatcaggacgtgctacctcgctagttgttgatagtggtggaggatcaactacaattgcaccagtccatgatggttatgttattcaaaaggctgtggccttttctcctattgggggagaacttcttactgattgcttgatgaaaagcttggagagcaaaggtgtcatgataaaaccaaggtactctttcaaaaggaaggaaatacagccgggcgtgtttcagactgtggatcttgattttacaaatacaactgacagctacagactctactctcagagagtgattgcaagtgatatcaaggaatgtgtgtgtcgtgcaccggatacgccctatgatgaaagttcatactcaaacattccaatgactccatatgagcttccggatggccagacaattgaaattggagctgatagattcaagattccagatattctattcaatccatccttggtccagacaattcctggtatggataattttgtggagattgctcctagtgttcgcggtttgccacaaatggttattgaaagcattaataagtgtgatgttgatattcgaagagaactgttcagtagtatactgcttgctggtggaacagcatcaatgcaacagttgaaggaacggcttgagaaagatttgcttgaggagtctcctcaagctgccagagttaaagtgctggctagtggaaatgcaactgaaaggagattcagtgtctggataggagggagtatattggcatctcttggttcattccagcagatgtggttctccaaggccgagtatgaagagcatggggcgtcttatgtacagagaaaatgcccttga

SEQ ID NO: 266 - protein, 441 aa, Populus trichocarpa
MYGGDEVSAIVIDLGSHTCKAGYAGEDAPKAVFPSVVGSIDQMDVDDMTSNEKNAAVDSKNNVKDSEKGKGKRKLFVGSQALGFRRDHMEVLSPFKDGIVADWDIVDSIWDHAFRECLLIDPKEHPMLLAEPSSNSQQQRERTAELMFEKYTTPALFLAKNAVLTSFASGRATSLVVDSGGGSTTIAPVHDGYVIQKAVAFSPIGGELLTDCLMKSLESKGVMIKPRYSFKRKEIQPGVFQTVDLDFTNTTDSYRLYSQRVIASDIKECVCRAPDTPYDESSYSNIPMTPYELPDGQTIEIGADRFKIPDILFNPSLVQTIPGMDNFVEIAPSVRGLPQMVIESINKCDVDIRRELFSSILLAGGTASMQQLKERLEKDLLEESPQAARVKVLASGNATERRFSVWIGGSILASLGSFQQMWFSKAEYEEHGASYVQRKCP

SEQ ID NO: 267 - DNA, 1308 bp, Solanum lycopersicum
atgtacggtggtgatgaagtgtcagcaattgtgatagatttgggtagccatacttgcaaagctggttacgctggggaagatgctcccaaagccgttttcccatctgctgttggatcggttgatgaaatggaagttgataatcctgataatccagaggataattctggatctgctcctgaccttaaatcaaagggtaagcggaaattgtatgttggatctcaagccttgggatttcgccgtgatcacatggaggtgatatcacccatcagggatgggatggttgtggactgggatattgtagaaaacatatgggaccatgcttttagggaatgcttactgatcgatccaaaggagcatccaatgttacttgcagagccttgttcaaacactcagcagcagagggaaaaggctgcagagataatgtttgaaaaataccaagttccagcattgtttttggccaaaaatgctgttctcacatctttcgcatcaggacgtgcaacttctttggttgttgacagtggtggaggattgactactgttgctccggttcatgatggatgcgttcttcaaaaggcggtttgtacatctcctattgggggtggaattcttaccgattgcttgataaaaagtttggaacagaaaggcattacgataaaacctaggtattcattcaagcggaaggagatccgtccaggagaatttcagacagtggaccttgatttccctgatacaaccgagagttacaagctatattgtcagagagcgattgcaagtgacataaaagaatgcgtctcccgagccccagatactccatatgatgacagttcatattcgaacattccaacgacatcttatgagctacctgatgggcagataatagaagtcggagcagatagattcaagattcctgatattatattcaatccatcattggttcagactattcccggtatggaaagttttgctgaaactgccgcttcccttcgtggtcttccacaaatggttatagatagcataaacaagtgtgatgtggatattcgaagagaactttttagcagtatattgcttgctgggggaacagcatcgatgcaacaactcaaagaacgtctggagaaggacttgctagaggagtctcctcaggcagcgagagtcaaagtcctggctagtggaaatgctacagaaaggagattcagtgtttggatagggggcagcattctggcatctcttggctcctttcaacaaatgtggttttcaaagtccgagtacgaagagcatggggcatcttacgttcaaagaaaatgcccttaa

SEQ ID NO: 268 - protein, 435 aa, Solanum lycopersicum
MYGGDEVSAIVIDLGSHTCKAGYAGEDAPKAVFPSAVGSVDEMEVDNPDNPEDNSGSAPDLKSKGKRKLYVGSQALGFRRDHMEVISPIRDGMVVDWDIVENIWDHAFRECLLIDPKEHPMLLAEPCSNTQQQREKAAEIMFEKYQVPALFLAKNAVLTSFASGRATSLVVDSGGGLTTVAPVHDGCVLQKAVCTSPIGGGILTDCLIKSLEQKGITIKPRYSFKRKEIRPGEFQTVDLDFPDTTESYKLYCQRAIASDIKECVSRAPDTPYDDSSYSNIPTTSYELPDGQIIEVGADRFKIPDIIFNPSLVQTIPGMESFAETAASLRGLPQMVIDSINKCDVDIRRELFSSILLAGGTASMQQLKERLEKDLLEESPQAARVKVLASGNATERRFSVWIGGSILASLGSFQQMWFSKSEYEEHGASYVQRKCP

SEQ ID NO: 269 - DNA, 909 bp, Triticum aestivum
atgtacggcggcgacgaggtctcggcgatcgtcatcgacgtgggctcctacagctgcaaggcgggctacgctggcgacgacacccccaaatgcgtcttcccctcggttgttggttcaattgaacaaacgggagatactgatgaagctaagccagaaaaggaggccgactctggatcagatcctaagaatggatccaagcctatggatgtggacaaagccaagacaaagcgcaaattttatctaggccaagaattagaattcaggagggatcatatggaggtgatctcaccgctgaaagatggaacagttattgattgggaagttgttgacaacatatggaaccatgcttttagacggcggctattgatcaatcctgaagagcatcctatgctgatagcagaaccatctacaaacagtggacagcaaagagagaaagcagccgaacttatgtttgagaagtacaaagtgccagcgctgttcctagcaaaaaatgcagttctcacatcttttgcatctggacgtgctacatctctggtggttgactgtggtggcgggtctactgtggtttctgctgtgcatgatggttatgttttgcaaaagtctgtggcaacttctccgattggcggtgaatttttgactgactgtatgatgaaaagcttggagagcaagggcgttgttatcaggccccgggattccttcaagaagaaggaagtgagccctggagattataaggttgtagaccttgattttccgaacaccacggatagttacaggttgtaccacatgagagctattgctagcgacatcaaggagacggtttgtagagttccagatactcccttcgatgaagtggcatatgcaaatgctcccacaacttcatacgagcttccagacgggcaaactatttga

SEQ ID NO: 270 - protein, 302 aa, Triticum aestivum
MYGGDEVSAIVIDVGSYSCKAGYAGDDTPKCVFPSVVGSIEQTGDTDEAKPEKEADSGSDPKNGSKPMDVDKAKTKRKFYLGQELEFRRDHMEVISPLKDGTVIDWEVVDNIWNHAFRRRLLINPEEHPMLIAEPSTNSGQQREKAAELMFEKYKVPALFLAKNAVLTSFASGRATSLVVDCGGGSTVVSAVHDGYVLQKSVATSPIGGEFLTDCMMKSLESKGVVIRPRDSFKKKEVSPGDYKVVDLDFPNTTDSYRLYHMRAIASDIKETVCRVPDTPFDEVAYANAPTTSYELPDGQTI

SEQ ID NO: 271 - DNA, 1332 bp, Zea mays
atgtacggcggagacgaggtttcggcaatcgtcatagatgtgggctcttacagctgcaaggcgggctacgcaggcgacgacacccccaaggccgtcttcccatcggttgttggttcaattgaacaaactgaagacacagatgaccccaagccagagaaggaagctgactctgcatcagattctaagaacggtgccaagcccatggatgtggacaaagccaagacaaaacgcagactttatgtaggccaagagttagagttcaggagggatcacatggaggtgatttcatctatgaaagatggaacggtaactgactgggatattgttgataatatatggaatcatgctttcagacggaggttgttgatcaatcctgaagagcatcctatgctcattgctgaaccatctacaaacactgcacagcaaagagagaaagcagcggaacttatgtttgagaactacaaagtgccagcgctgtttctagccaaaaatgcagtgctcacatcttttgcgtctggacgagctacatctttggtggttgacagtggtggtgggtctactgtggtttctgctgtacacgatggttttgttttacagaagtctgtgtcgacttctccagttggcggtgaatttttaactgactgtatgatgaaaagcttggagagcaagggcatcgtcattaggcccagatattcatttaagaagaaggaaatcagtcctggagaatataagattgtagatcttgatcttccaaacacaactgagagttacaggttgtactgcatgagagctattgctagtgacgtcaaggagtctgtttgcagagttccagacactgcttttgatgaagtggcatatgcaaatgttcctacaacttcatatgagcttcctgatggacaaactattgaagttggtgctgatagattcaaggttcctgatattctatttaatccatctctatcccagactattcctgggattgatggatttgcagattcaataccagtccgtggccttcaacgaatggtcattgatagcgtaaataagtgcgacgttgacatacgaaaagagctattcagtaacatcttgctctctggtgggtcatcatcaattctgcagttaaaggagcgcctggagaaagaagtattggaggagtctcctcaagctgctcgtgtcaaggttatggcaagcggaaactcagtagagagacgtttcagtgtttggattggagggagcattctagcatctcttgggtcgttccagcagatgtggttctccaaagcagagtatgaagagcatggggtttcctatattcagagaaagtgcccttga

SEQ ID NO: 272 - protein, 443 aa, Zea mays
MYGGDEVSAIVIDVGSYSCKAGYAGDDTPKAVFPSVVGSIEQTEDTDDPKPEKEADSASDSKNGAKPMDVDKAKTKRRLYVGQELEFRRDHMEVISSMKDGTVTDWDIVDNIWNHAFRRRLLINPEEHPMLIAEPSTNTAQQREKAAELMFENYKVPALFLAKNAVLTSFASGRATSLVVDSGGGSTVVSAVHDGFVLQKSVSTSPVGGEFLTDCMMKSLESKGIVIRPRYSFKKKEISPGEYKIVDLDLPNTTESYRLYCMRAIASDVKESVCRVPDTAFDEVAYANVPTTSYELPDGQTIEVGADRFKVPDILFNPSLSQTIPGIDGFADSIPVRGLQRMVIDSVNKCDVDIRKELFSNILLSGGSSSILQLKERLEKEVLEESPQAARVKVMASGNSVERRFSVWIGGSILASLGSFQQMWFSKAEYEEHGVSYIQRKCP

SEQ ID NO: 273 - DNA, 1722 bp, Glycine max
atgggcgaggtatctgaaagtaccatgacgaagaggaagaagaagggacgcccctctcttttggatcttcaaaagcgatctctcaaaaaagaacagcaaaatcaccaccagcagcgacacaattcaaccaacgttgttccccacgacgacgacgaggacgagcgcaaggagaagaagcacaagctcttggttggtctcaattcccatctccaccacccaacattattgcccaattcccaacccttcaattccgatcccaagaggcgcaagattattgaccctctccaaacggatgtgaaggttccgaaagcgactgacagtaaacaacatggttcgcagggagagtccggtcccactacgcctttgccagacaaaaagctcttgctgtttatccttgacaggcttcaaaaaaaggacacacatggggtgttctctgagccagtggatccagaagagcttcctgattatcttgacatcattaaacacccgatggattttggaactgtcaggaagaaattggatggggggctatatactgacttggaacattttgagaaagacgtgttcttgatatgctctaatgcaatgcaatataattcctcagataccatttaccatcgacaggcccgagccatgcaagagattgcaaggaaagactttgagaatcttagacaagatagtgatgatgatagtgaaccacagcccaaaattgtgcagagaggaaggccaccaggcaagcactcaagaaagtcactgggactgggtatgcctcctcctgagcgtgttggtcctgaatcttcttctgatgcaactctggcttctggcggggatattgctagtggttccaacggttataatctaagaaaagtacccagcaaatttcagcccacagattcatctgcgagggcctacaacagcacttttaacagtggagggtatgttggctggtctgaatgggagaatgaatttccagcttctgttgtaaaagctgtgctaagatatggaaagaagcagtttgtggttgatgaaaccaggcgtgatacttacaaaaatccagtgactttaggaaatgaacgaccggtgttgtccacagttgaagatgaattcaagcaacttcttgcagtaggtgtacacatgaagcatagctatgcaagaagtctagcccattttgctgcagaccttggtcctgttgtttggaagattgctgcaagtaaaatcagcagtgttttgccagcaggacatgattttggtcctggatgggtaagtgaagatgatggttcgtcacagaggcgacacttcccagtttgtgatgagggtagaacttcagaccctcctgtaccagaggattatagaagtagattttcttctccatctggatcgctcccccttgcaaatagaccattctatcaaagtggagacatggctatagataattaccaaaatgagttgaatccagtaatcaacattcctggtgggtctgaatccataactcctatgaggattcagcaggaatccatggtgcactctgatgattttggttcatgtgatcggttaggttctaatttcccatctcaaatgaagatgggattggaagttcccactaaacagaattcttttgctcttgctaatgacttaaatggaaggattggaactacaaactcacccagttccaacgtggaggctggttcccagttgcagcctaatttggcattacagctctga

SEQ ID NO: 274 - protein, 573 aa, Glycine max
MGEVSESTMTKRKKKGRPSLLDLQKRSLKKEQQNHHQQRHNSTNVVPHDDDEDERKEKKHKLLVGLNSHLHHPTLLPNSQPFNSDPKRRKIIDPLQTDVKVPKATDSKQHGSQGESGPTTPLPDKKLLLFILDRLQKKDTHGVFSEPVDPEELPDYLDIIKHPMDFGTVRKKLDGGLYTDLEHFEKDVFLICSNAMQYNSSDTIYHRQARAMQEIARKDFENLRQDSDDDSEPQPKIVQRGRPPGKHSRKSLGLGMPPPERVGPESSSDATLASGGDIASGSNGYNLRKVPSKFQPTDSSARAYNSTFNSGGYVGWSEWENEFPASVVKAVLRYGKKQFVVDETRRDTYKNPVTLGNERPVLSTVEDEFKQLLAVGVHMKHSYARSLAHFAADLGPVVWKIAASKISSVLPAGHDFGPGWVSEDDGSSQRRHFPVCDEGRTSDPPVPEDYRSRFSSPSGSLPLANRPFYQSGDMAIDNYQNELNPVINIPGGSESITPMRIQQESMVHSDDFGSCDRLGSNFPSQMKMGLEVPTKQNSFALANDLNGRIGTTNSPSSNVEAGSQLQPNLALQL

SEQ ID NO: 275 - DNA, 1704 bp, Oryza sativa
atgggcaagcagcagccgcagccgccaccggcggcgatgtcggcgccaccgcggaagcggaagaagaaggggcggccctccctcctcgacctccagaagcggaccctccgcctcgagaagctgcaggagccgccgccgccgccaccgcccccgcagccgcggcggtccacgcggaggaaccccgccggcgtcgactccggcgacgaggggacggcacccggcggccgccgcgagaagaagctccgcctcgtcatgggcctccccgacggatcggccaagggagaaaagacgaggaaagcgacggatgggagtgaagagccgtcagattccgggcccacgacacctttgccggacaaaaagttgttagtcttcgtccttgataggctgcagaagaaggacacatatggtgtattctctgaccctgttgaccccgaagagctgcctgattaccatgatattatcaagcatccaatggatttttcaacaattcggaagaagctcaataaaggggcttatggcaacttggagcaatttgaggatgatgtattcttgttaacctcaaatgcgatgtgctacaattcaccagatacaatatactatcgacaggcacgggcgatccaagagcttgccaagaaggactttgagaaccttaggcaggatagtgatgcaagtgagccagaaccagaaccggaaattaaaccagatcctgaaccaaagccacaaccacggaggggcaggcctccaaataagaacactatcaaacagaaagttgggaagccaccggtagaacgcgctactgcagacttttctggagcaacactcgctagtgttggaaataatggacatcgtacgcagccaccatttgatctgcaacggcaagtaatgaatggatcctttatcgcagatgtactgagagcttcttttgccagtcgaaataatggatacaattggtctaacgagcgcaaattggaaagaattgaagattactcagggtctatcggtaaatggtcagcaaaaagtgggagaaaaccaattctgacagaagaaagtagccgaagcacttattgtcagcctcaaccttcgagttcaatatatgagctgccggtgtcgtcctcatacaacgagacaaggaagctgctagttccagttggggttcagttgcagcagtcctatccccgcagcttggcacgttttgctgcgcagctaggtcctgtcgcttgggagattgcgtccaaacgaattgaacgtgcccttcccccaggaacaaagtttggccgtgggtgggtaggagacggtgaagcaccgaacgcaactcagccaccagtgcttactacatcttcaacagccttgatacacccaagtagtacagaaacatcaagtgaacagccaactcataacggtacggccagcacaagccattcagcaggacctcagccatcttccgcaccatatgcctcttctacaatcacaactcatagggtcaattgtcagtcattaccaagccagcaacacggatcagtgccacaggtttcagcagaaagaggtgaacatggtgctgaggtgaagggcaaccataataatcttcatgaacggccagccattcagcacactgttaatggcttcagtgctgtttcaggatcaaacatattcccttctgcggcacagatggtggcgaatcggatgcagacacatacagctgattag

SEQ ID NO: 276 - protein, 567 aa, Oryza sativa
MGKQQPQPPPAAMSAPPRKRKKKGRPSLLDLQKRTLRLEKLQEPPPPPPPPQPRRSTRRNPAGVDSGDEGTAPGGRREKKLRLVMGLPDGSAKGEKTRKATDGSEEPSDSGPTTPLPDKKLLVFVLDRLQKKDTYGVFSDPVDPEELPDYHDIIKHPMDFSTIRKKLNKGAYGNLEQFEDDVFLLTSNAMCYNSPDTIYYRQARAIQELAKKDFENLRQDSDASEPEPEPEIKPDPEPKPQPRRGRPPNKNTIKQKVGKPPVERATADFSGATLASVGNNGHRTQPPFDLQRQVMNGSFIADVLRASFASRNNGYNWSNERKLERIEDYSGSIGKWSAKSGRKPILTEESSRSTYCQPQPSSSIYELPVSSSYNETRKLLVPVGVQLQQSYPRSLARFAAQLGPVAWEIASKRIERALPPGTKFGRGWVGDGEAPNATQPPVLTTSSTALIHPSSTETSSEQPTHNGTASTSHSAGPQPSSAPYASSTITTHRVNCQSLPSQQHGSVPQVSAERGEHGAEVKGNHNNLHERPAIQHTVNGFSAVSGSNIFPSAAQMVANRMQTHTAD

SEQ ID NO: 277 - DNA, 1719 bp, Physcomitrella patens
atggcggagaaggacaagaaactgaaggtgattcttaaactgccaaagaaatcaagcagccgtagcaaggcgggggtccctggtgcactatcatcacccggaggaatatctcataaaataaattcctcgccagtcgtagagagtgagacgccgttgaagccgagttctaagttgtctgttcccaacgctaatgctaatagtcgtgttgccacccctcctaagaaacgcaagttcaagactttagttgaaggggacgccaaggatgatctaggaggcgcatgtggtgtctcaagtactactgaaattctccccgtcttcaaggctcccttgccccctttcgctaagaagccttctcataagaaaaaagagaggccgattaatggcgcaattgaagctccttttccaagtctaggaaaaggacaaggcccctcaccagcgcctgctaagaaggtgcttgaaggtgtgttagacaagctgaaaaaaaaagacacatatggagtattttcggagcctgtggatgcaaacttggttccagattactatgatgtcatcaaagagcctatggacttcggcacgatgtacaagaagatctcaaaggggctgtataacatattaagtctatttgagaaagatatcatgctcatttgcaacaatgctatgcgatacaatggcccagaaacagtatactataagcaggcacgctcaatacaagatgctgcccgtaaggcattggatgtgatagctagtcaagctgggtctgctgaagctggaaccgccaagcctgctgcgcacaaaaagcaggctcatccatcaaagaaaacatggtccaacccagcagctccgaagacaacattggaacctgcgaattccgactttgcttctggggccagtttagcagcagagggagaagctcagtcaaataaacacgatttcgtcacttccaaaagagggacacagtcggatagatctggaagtgttgctggagaggagccaggatatggggttcagtcacaggcaactgccgcctttgagccagacgcagatgtgcaagatgaacaaggggctcaacagaaaccagtagctcttaaggatgggcgaaggccttcgtcaacagaagagtatcacagaagcacttacaagccacggaacctttctgctcatggaagaggacctacttttgctggtgttggtggtgaattgcatcaccttgtaccaacagggtatcagtcagagatggcgtatgcaaagagcttgtctcgattttcagctaaactgggacctgagggatggaaattcgcagctcaaagattgcagagagtattagcaccctctgtaccttttgggcaaggatggataggtgtgcatgaagctcccccaggcacgattttcagaaagtttccttcggatgtaaaagttacaaatgcaacgaggaccaatcaaaatttgagctccacagcttcacctaaccttctgggaggtccatcctcttcttaccctccagttacttctgcttacgtgcctagccctaaatcatctcgcccattgacgataaatcccgcagcccaaactgcaatggattctttgccgactaaggttaccagtgccatgcttgtatcaggagcagcaagtcaaggaatatttccaggaaagttaacaatggaatcagttgttgagaaaccttcccagccagtttatcagctggagcgcagcagaagttga

SEQ ID NO: 278 - protein, 572 aa, Physcomitrella patens
MAEKDKKLKVILKLPKKSSSRSKAGVPGALSSPGGISHKINSSPVVESETPLKPSSKLSVPNANANSRVATPPKKRKFKTLVEGDAKDDLGGACGVSSTTEILPVFKAPLPPFAKKPSHKKKERPINGAIEAPFPSLGKGQGPSPAPAKKVLEGVLDKLKKKDTYGVFSEPVDANLVPDYYDVIKEPMDFGTMYKKISKGLYNILSLFEKDIMLICNNAMRYNGPETVYYKQARSIQDAARKALDVIASQAGSAEAGTAKPAAHKKQAHPSKKTWSNPAAPKTTLEPANSDFASGASLAAEGEAQSNKHDFVTSKRGTQSDRSGSVAGEEPGYGVQSQATAAFEPDADVQDEQGAQQKPVALKDGRRPSSTEEYHRSTYKPRNLSAHGRGPTFAGVGGELHHLVPTGYQSEMAYAKSLSRFSAKLGPEGWKFAAQRLQRVLAPSVPFGQGWIGVHEAPPGTIFRKFPSDVKVTNATRTNQNLSSTASPNLLGGPSSSYPPVTSAYVPSPKSSRPLTINPAAQTAMDSLPTKVTSAMLVSGAASQGIFPGKLTMESVVEKPSQPVYQLERSRS

SEQ ID NO: 279 - DNA, 2079 bp, Populus trichocarpa
atgggcgaggaagcagacccaacaatgaagaagaagaagaaaaagggacgtccttctcttctagagcttcaaaaacgctccctcaaacaacaacagctacagcaaacaacccctatttctcttaaaaaccctaatcctctcaattccaattctgccctccctaaccgtcgatccgctcgccggagctctaattcctatgcaccggagtggattgacggagacgacgacgaagacgacgacgaagacgatgagcgtaaagagaagaagcataagctcttgcgcggattgaattctcagaaaaataacaatcagaattccaattcgtcgagcccttcgaatttgcacggctctgattcgaatgctggtggcggtaatcaagaggacggaattagaaggcgcaagatcagcgccgtccgtcttggatctgatgatttgggtgaaaaggttttgaaagggacagacactattcatgggtcatctgtggagcctggtcccactacacctttgccagacaaaaagttgttggtcttcattcttgacagacttcaaaagaaggacacctatggggttttctctgagccagtggatccagaagagcttcctgattactttgacatcgttgagaatcccatggatttttctacagtgaggaaaaagttagatgagggagcctacgcccacttggaacaatttgagaaagatgttcttttgatatgctcaaatgcaatgcagtacaacccttccgatactatttacttccgacaggcaagggccatgcaagagcttgcaaagaaggactttgagaatcttaggcaagatagtgatgatagtgaaccacaaactaaggttgcgaggagagggaggccaccagccctaggcaagctgaaaaaggcacttgagaggtctccaattgaccgtgttggtcctgaagcttcctcggatgcaactcttgccaccggaggagatcacaataacttgtccaatggttacaatctcagaaaaagttcttcatacaagtaccagcctggtgatgcatttgtccgggcctcttacagcagtgaaaattattctacctggttatctgaatgggaaaatgaatttccagcatctgttgtaaaggctgtgatgaagtatggaaagaaaccgtttgtgctagatgagaacaagcgtgacacctataagcatccattgggctcccatgagccatccatcttatcgacctttgaaggagaattaaagcaattagtggtggtaggtttaagctctgagcacggttatgcaagaagtctggctcgatttgctgctgatcttggccctgttgtttggagaattgcttcgaagaaaattgaaagtgttttgccaacaggacttgagtttggccctgggtgggtaggagaaaataaagcaatggagaagcaaaagattttaaacaaccttgtatctgataaccatttaagcagatttcaacctgctgcttcttcaagtagagaggcagcatggaatagagaaggcctgccagaaactgttggcgggttaaatcctcaaaatgagttagctacactgaacagtggtgctggtgggatgaaatccatgccttctctccagattcagcagaaaccaataattcatcctgatatgaatggtttcagtggaggatttggatataactcttcacctcaaccggggatggcacgaactgtggcaccgacaggaaagctcaatttggagcagactgcagtgccttcccaaatgtttggtgtggttccaactggcaacagtgccttcatttcagtgcctgggaatgattttaatacaaataaaggtatgctgtcagaaacttcaagtggattattgcagcctggaatttctccagccgtaggctccagctctgactctcgtacatttggcaatgtggggtttggtggcaaatcatcttggcagggatttttaccatatcagcaacaaggtactgttccatttccaccagatctgaatgttggattcttggcacctggttcacctacttcgagtgtgcccatcggttcaccacggcagccagatttagcattgcagctctga

SEQ ID NO: 280 - protein, 692 aa, Populus trichocarpa
MGEEADPTMKKKKKKGRPSLLELQKRSLKQQQLQQTTPISLKNPNPLNSNSALPNRRSARRSSNSYAPEWIDGDDDEDDDEDDERKEKKHKLLRGLNSQKNNNQNSNSSSPSNLHGSDSNAGGGNQEDGIRRRKISAVRLGSDDLGEKVLKGTDTIHGSSVEPGPTTPLPDKKLLVFILDRLQKKDTYGVFSEPVDPEELPDYFDIVENPMDFSTVRKKLDEGAYAHLEQFEKDVLLICSNAMQYNPSDTIYFRQARAMQELAKKDFENLRQDSDDSEPQTKVARRGRPPALGKLKKALERSPIDRVGPEASSDATLATGGDHNNLSNGYNLRKSSSYKYQPGDAFVRASYSSENYSTWLSEWENEFPASVVKAVMKYGKKPFVLDENKRDTYKHPLGSHEPSILSTFEGELKQLVVVGLSSEHGYARSLARFAADLGPVVWRIASKKIESVLPTGLEFGPGWVGENKAMEKQKILNNLVSDNHLSRFQPAASSSREAAWNREGLPETVGGLNPQNELATLNSGAGGMKSMPSLQIQQKPIIHPDMNGFSGGFGYNSSPQPGMARTVAPTGKLNLEQTAVPSQMFGVVPTGNSAFISVPGNDFNTNKGMLSETSSGLLQPGISPAVGSSSDSRTFGNVGFGGKSSWQGFLPYQQQGTVPFPPDLNVGFLAPGSPTSSVPIGSPRQPDLALQL

SEQ ID NO: 281 - DNA, 2355 bp, Oryza sativa
atgccgcggaaggcctcgtcgacctcagattcgcgcctgaaatggcggaagtggaagcggaaccccaccgcgtccccgtcgccgtccaaccgctcgtcggccgccgccgccgcggcggaccactccgacgactccgactccgccgccgttaacgaggacgacgactccgcggtccccgaggacgccgacgacgaaaccctagccggggcggaggaccccgtgctcgacctccgcgaggcggaggtgctcccttcggcggagcccgtctcggcgttccccgtcgccacccgacgcgtcgtcaaccggccgcacccgtccgtcctcgccgtcatcgcggccgagcgatccgcgtgcgcgggtgagggttccgccgcggtggcggcggcgccggtgctggagaacatctcgtacgggcagcagcaggtgctctccggggtgctccctgaccacgcttcgctcgcgacggacactgacaagccgtctacctatgtgtgcacgccgccgaatcttatggaggggcatggcgtgaccaagcagttccagggtcgcctacatgtcgtgcccaagcactcagattggttctccccagggatcgtgcacaggctggaaaggcaggtggtgccacagttcttttcagggaagtcgccgggcaacactccagagaagtacatgctattgaggaataaggttattgcaaaatatttagagaacccaagcaagaggcttgcttttgcagagtgccaggggcttgttgcgaacacagctgaattatatgatctcagtaggattgttaggttcttagacacttggggaatcatcaattaccttgcgtctgggtcggtgcaccggggtctaaggatggcaacctcccttctaagggaggagccaaccggggagttgcaactattgactgcgccactgaaatcaattgatggcctaattttgtttgatcgaccgaaatgtaacctccaagcagaggacatttcttcattggcatcaaattcggaggttgtggattttgatgctggacttgcagaattggatggaaagattagggagcgattgtcagagagttcttgcagttattgcttacagcctttgaccagcttgcactatcagtcactaaaggaggcagatatcgctctatgctctgattgcttccatgatgcgagatatattactgggcattcaagcttagattttcagaggattgatggggataacgatagatcagaaaatgatggggatagttggactgatcaagaaacgttattgctgttggagggcatagagaagtacaatgacaactggaataacattgcagagcatgttggaacaaagtcaaaagcacaatgtatttaccattttattcgtcttcctgttgaagatggtttgttagagaatattgaggtgccagatgcatctgtgccatttagagcagaaaccaatggatacccacatttagattgcaatggcagtacttcaggaaatctacctcaaaaaattccacctgataaccagcttccgttcattaattcttctaatccggtgatgtcactggttgggtttttggcttctgctatgggaccaagagttgcagcatcatgtgcaagtgctgctttatcagttttgacagtagatgatgattccagggtgaattcagaaggcatttgctctgattctaggggccaaggtccgcatccgaattttcgtgatcataatggtggtgtatcttcatccatctctccagaaaaggtgaagcatgctgccatgtgtggtttgtcggcagcagctacgaaggctaaactttttgcagatcaagaggaacgtgaaatccaaagactaactgctactgtaataaaccatcagttaaaaaggttggaactgaagctgaagcagtttgccgaagtcgagaccttgcttttgaaagaatgcgagcaagtggagagaataaggcagaggattgcatctgaccgtgtccgaatcgtgtccacccgcttggcctcgcctggaaatagcctacctgggggtagtactagcaccatgtcatccaatccaatgagtatgagccccagaccgatgggcgtgccaggctcgatgcctcaatccagtatgccagcaccatttgccaataacatgcaggggcatggtcacccccagatggcattcttacaacagcagcagcggcagcagatgctgtcatttggacctcgtctgccgctgtcggccatccaaacccagccatccccacagacgtcaaacatcatgttcaacccaggcatgcccaattctgtaacccctaatcatcatcaactgttgaggtcgtcttctggaaacaattcaagtgtaggatag

SEQ ID NO: 282 - protein, 784 aa, Oryza sativa
MPRKASSTSDSRLKWRKWKRNPTASPSPSNRSSAAAAAADHSDDSDSAAVNEDDDSAVPEDADDETLAGAEDPVLDLREAEVLPSAEPVSAFPVATRRVVNRPHPSVLAVIAAERSACAGEGSAAVAAAPVLENISYGQQQVLSGVLPDHASLATDTDKPSTYVCTPPNLMEGHGVTKQFQGRLHVVPKHSDWFSPGIVHRLERQVVPQFFSGKSPGNTPEKYMLLRNKVIAKYLENPSKRLAFAECQGLVANTAELYDLSRIVRFLDTWGIINYLASGSVHRGLRMATSLLREEPTGELQLLTAPLKSIDGLILFDRPKCNLQAEDISSLASNSEVVDFDAGLAELDGKIRERLSESSCSYCLQPLTSLHYQSLKEADIALCSDCFHDARYITGHSSLDFQRIDGDNDRSENDGDSWTDQETLLLLEGIEKYNDNWNNIAEHVGTKSKAQCIYHFIRLPVEDGLLENIEVPDASVPFRAETNGYPHLDCNGSTSGNLPQKIPPDNQLPFINSSNPVMSLVGFLASAMGPRVAASCASAALSVLTVDDDSRVNSEGICSDSRGQGPHPNFRDHNGGVSSSISPEKVKHAAMCGLSAAATKAKLFADQEEREIQRLTATVINHQLKRLELKLKQFAEVETLLLKECEQVERIRQRIASDRVRIVSTRLASPGNSLPGGSTSTMSSNPMSMSPRPMGVPGSMPQSSMPAPFANNMQGHGHPQMAFLQQQQRQQMLSFGPRLPLSAIQTQPSPQTSNIMFNPGMPNSVTPNHHQLLRSSSGNNSSVG

SEQ ID NO: 283 - DNA, 2391 bp, Populus trichocarpa
atgccagcttctccttctttcccttcctcagatggtaggggcaaatggaaaaggcgaaagcgaggagattctcaaattacacgaaaacctccaaagcaccaccaccaagaagaaacagaagaacccgaagaagaagacgacgccgttgatgcagacgaaaataataacaacgtcatcgacagagaagattctgatgacccgaacccaaatcaacagcccagcggacccgatccaaaccctcaagagaccgaggttttaattgacggtggggtccgcttatgcgatttccctcctgtcacgaggctcgctgtgaaccgccctcatgcctccgtgatggcgattgtggcggccgagagggcctgcttggctggggaaagcagtaatagagggcaattggtggttagtttggagaatgtatcgtacgggcagctgcaggcggtgtctgctgtgatagcggactgtgatgggagtgatttggagaggagtgatggagggaatacagggtatgtagtgacgccgccgcagattatggatggaaagggtgtcgtgaagaggttttggagcagagttcatttggttcctatgcattcagattggttttctccggccttggtaaatcgactggagagacaagtggtgccacattttttctctggaaaatctccagatcacacaccagagaaatacagggagtgtagaaatcgcattgttgctaaatacatggagaatccagagaagaggctcacagttcctgattgtcaaggattggtagtcggcattgacaatgaagattttactcgaatttttagatttcttgatcattggggaattataaactactgtgcagctccaccaagttgtgaatattggaatggggggtcttatttaagggaggatccaaatggtgaggttcatgtgccatcagctgctttaaagtcttttgatagtttgatccaatttgacaagcccaaatgtaggctcaaggcagctgatgtttactcatcattgtcatgtcatgatgatgatctctctgacttggacaacagaattcgagagtgcttatctgaaaatcgttgcaatcattgttctcagcttcttccctctgtgtgctaccagtcacaaaaggaggttgatatactattatgccctgactgctttcatgaggggagatttgtgactggtcattcaagcttagattttattaaggtggattcaacaaaagattatggagatatagatggggaaagttggagtgatcaggaaacattactgctacttgaggcaatggaaatttacaatgagaattggaatgaaattgcagagcatgttggctccaagtcaaaagcacaatgcatccttcattttctccgtctgcctgtggaggatggcctgttggaaaacattgaagttcctagcatgcccaagtcaatcagcccatcaaatagagaggataacagaagaccacactcaagttcaaatggatcctgcctccaaggtgctgatgctgaaaacaggctcccttttgcaaattctggcaatccagttatggcattggttgcttttctggcctctgctgttggaccaagagttgctgcagcctgtgctcatgcatctttggaagcgctgtctgcagataataggttgggttcagagagactacatggtagagaaggtggttttcatggagaagttgcaaattcaattcaactagaagaagatagccaacatggctcacggggtcaaaatggggctgaggttgctcctccgtctgctgaaaaagttaaagctgctgccaaagctggccttgctgctgcagcaacaaaagctaaactgtttgccgatcatgaagaacgagaaattcagaggctatctgctaatataataaatcatcagttgaagagattggagcttaagctgaagcaatttgcagaagtggaaacctttctaatgagagagtgcgagcaagtggagaagacaaggcagaggtttgctgctgagcgaatccgcatgctatctacccggataacacctgcaggagttgcttcacaaatgaaccaagcaggtgttgctccttcgatggttaacaataatgttggcaacagtaggcagcaggtgatgccttcctcttcttcgcaaccaagcatttcaggatatggcagcagtaacccagcccatccacacaacaatcaacaagtccattctcacatgtcatatatgcaacggggacagccacaaccaatgtttccattagggccgaggctgcccgtggcagctatacagccatcatcgccagctccgtcaagtgtcatgtacaatgcctctggaaattcacagcctaacctcaatcaaatgctgcggtccgtgtcaggccctagctctggtttaggttga

SEQ ID NO: 284 - protein, 796 aa, Populus trichocarpa
MPASPSFPSSDGRGKWKRRKRGDSQITRKPPKHHHQEETEEPEEEDDAVDADENNNNVIDREDSDDPNPNQQPSGPDPNPQETEVLIDGGVRLCDFPPVTRLAVNRPHASVMAIVAAERACLAGESSNRGQLVVSLENVSYGQLQAVSAVIADCDGSDLERSDGGNTGYVVTPPQIMDGKGVVKRFWSRVHLVPMHSDWFSPALVNRLERQVVPHFFSGKSPDHTPEKYRECRNRIVAKYMENPEKRLTVPDCQGLVVGIDNEDFTRIFRFLDHWGIINYCAAPPSCEYWNGGSYLREDPNGEVHVPSAALKSFDSLIQFDKPKCRLKAADVYSSLSCHDDDLSDLDNRIRECLSENRCNHCSQLLPSVCYQSQKEVDILLCPDCFHEGRFVTGHSSLDFIKVDSTKDYGDIDGESWSDQETLLLLEAMEIYNENWNEIAEHVGSKSKAQCILHFLRLPVEDGLLENIEVPSMPKSISPSNREDNRRPHSSSNGSCLQGADAENRLPFANSGNPVMALVAFLASAVGPRVAAACAHASLEALSADNRLGSERLHGREGGFHGEVANSIQLEEDSQHGSRGQNGAEVAPPSAEKVKAAAKAGLAAAATKAKLFADHEEREIQRLSANIINHQLKRLELKLKQFAEVETFLMRECEQVEKTRQRFAAERIRMLSTRITPAGVASQMNQAGVAPSMVNNNVGNSRQQVMPSSSSQPSISGYGSSNPAHPHNNQQVHSHMSYMQRGQPQPMFPLGPRLPVAAIQPSSPAPSSVMYNASGNSQPNLNQMLRSVSGPSSGLG

SEQ ID NO: 285 - DNA, 2619 bp, Brassica napus
atgaattcaattttttccggtactcgtctaagggacatgatccgatccataagagcgtgcaaaacagctgcggaggagcgtggcgttgtgaggaaagagtgtgctgatatcagagcgtccattaatgaaaatgaccctcatgataggcaccggaacctcgccaagctcatgttcatacacatgctgggttaccctacgcattttggtcagatggagtgcttgaagcttattgcgtctcctggcttcccagagaagaggattggttatctcgggctgatgttgcttcttgatgagagacaggaagtgttgatgctcgtcacaaattcattaaaacaagatcttaaccacacgaaccagtatgttgtagggcttgcgctctgtgctttagggaatatttgctctgcagaaatggctcgtgatcttgcgcctgaagtagaaagattgatccagtttcgtgaccctaatatccgtaagaaggcggcactttgctccactagaatagtaaggaaggttccagatcttgcagagaactttataaatgctgcttcttccttgcttaaagaaaagcatcatggggttcttataacaggagttcagctttgttatgaactatgcacgatcaatgatgaagccctagaatacttccgaaagaaatgcacggaggggctgataaaaactttgagggatattacaaatagcgcatatcagcctgagtatgatgttgcagggatcacagatccttttcttcacatacggttacttaagctcctgcgtgttttaggccatggtgacgctgatgctagcgatttgatgactgacatacttgcccaggtggccacaaaaactgaatcaaacaaaaacgcaggaaatgccgtactctatgagtgtgttgaaacaatcatggccattgaagacaccagtagcttgcgtgtgcttgctatcaatatcttgggaagattcttatctaaccgcgacaacaatatcagatatgttgcattaaacatgctgatgaaagcaatcgcgtttgatgatcaagcagtgcaaaggcacagagttacaatcttagaatgtgttaaggacccagatgcttccatccggaaaagagctcttgagctcgtttctcttttggtaaatgagaacaatgtcaaacaactgacaaaggagctgattgattatttggaaatcagcgatgaagattttaaggaggatcttagtgcgaaaatctgttccattgttgaaaagttttctctagagaaaatctggtacattgatcagatgctcaaggttctgtcggaggctggaaagtttgtgaaagatgatgtgtggcatgcactgattgttgtcataagcaatgcatcagagcttcatggatatacagtcagagcattatacaaagcagtcctgacatattcggaacaggagacccttgtccgagtggcgatttggtgcattggggaatatggtgatttgctggttaacaatgtggggatgcttggtattgaagatccaataacggtaacggaaagtgatgcagttgacgttgtcgaggatgccattactcgccataactcagatatgactactaaagctatggcattggttgctctgctgaagctgtcatcccgctttccttctatctcagagaggattaaagatataattgtgaagcagaaagggagccttctccttgaaatgcagcagagagctattgaattcaattctattgttgacaggcataaaaatatcaggtcttctctggttgagagaatgccggtgctagatgaggctaccttcaatgtgaggagggctggctctttgcctgcgtcagtttcaacaatggccaaaccttcagttagtattccaaatggtgttgctgcagctccactagtggatttattggacttgggttctgacgatatcatggctgcacctagttcatctggtgcagatttccttcaggatcttcttggtgttgacttaggatcatcgtcagtacaatctggtgcatccccgggtccaaaagccggtgcagatctgttgatggatattttatcaattgggacaccttctccggcacaaaacaacacatcatcagttgatttgttatcaacagctggcattaacaacaatccttctaatgcgctagacacactttcttcaccagctctacctcacatagcaacgactgcttctgctggtggtatgttcgatttgttagatggtcttactcctagcccatcgaaggaagcaaccaatggtccagcatatccacctattgttgcatacgagagcagcaccttgaagattgagttcacattctcaaagtcatcagggaacccacaagaaacaaatgtccaggccacttttataaatctatctcctaatactttcacatattttatcttccaggctgctgttccaaagttcctccagctgcacttggatccagcaagcagtaacacactcccggcaagcggtaacatcacgcagaatctgagagtcacaaacagccagcacggcaagaaatctcttgtgatgcgcatgaggattgggtacaaagtgaacggaaaagatgtattggaggaaggacagatcaacaacttccctcgtgggttgtga

SEQ ID NO: 286 - protein, 872 aa, Brassica napus
MNSIFSGTRLRDMIRSIRACKTAAEERGVVRKECADIRASINENDPHDRHRNLAKLMFIHMLGYPTHFGQMECLKLIASPGFPEKRIGYLGLMLLLDERQEVLMLVTNSLKQDLNHTNQYVVGLALCALGNICSAEMARDLAPEVERLIQFRDPNIRKKAALCSTRIVRKVPDLAENFINAASSLLKEKHHGVLITGVQLCYELCTINDEALEYFRKKCTEGLIKTLRDITNSAYQPEYDVAGITDPFLHIRLLKLLRVLGHGDADASDLMTDILAQVATKTESNKNAGNAVLYECVETIMAIEDTSSLRVLAINILGRFLSNRDNNIRYVALNMLMKAIAFDDQAVQRHRVTILECVKDPDASIRKRALELVSLLVNENNVKQLTKELIDYLEISDEDFKEDLSAKICSIVEKFSLEKIWYIDQMLKVLSEAGKFVKDDVWHALIVVISNASELHGYTVRALYKAVLTYSEQETLVRVAIWCIGEYGDLLVNNVGMLGIEDPITVTESDAVDVVEDAITRHNSDMTTKAMALVALLKLSSRFPSISERIKDIIVKQKGSLLLEMQQRAIEFNSIVDRHKNIRSSLVERMPVLDEATFNVRRAGSLPASVSTMAKPSVSIPNGVAAAPLVDLLDLGSDDIMAAPSSSGADFLQDLLGVDLGSSSVQSGASPGPKAGADLLMDILSIGTPSPAQNNTSSVDLLSTAGINNNPSNALDTLSSPALPHIATTASAGGMFDLLDGLTPSPSKEATNGPAYPPIVAYESSTLKIEFTFSKSSGNPQETNVQATFINLSPNTFTYFIFQAAVPKFLQLHLDPASSNTLPASGNITQNLRVTNSQHGKKSLVMRMRIGYKVNGKDVLEEGQINNFPRGL

SEQ ID NO: 287 - DNA, 2616 bp, Glycine max
atgaacccgttctcttcaggaacgcgtttgagggacatgattcgggccatacgtgcttgtaagactgcagcagaagaacgagctgttgtaagaaaagaatgtgctgccattcgtgctgcaataaatgaaaatgataatgactataggcatcggaacctggctaagctaatgttcatccacatgcttggttaccccacacattttggtcaaatggaatgcctcaagttgatagcatctcctggatttccagagaagagaataggttatcttggcctcatgttgcttcttgatgaaagacaagaagttctaatgttggtcaccaattctttgaaacaagatcttaatcacacaaatcagtatatagtgggacttgctctttgtgctttaggaaacatttgttcagcagaaatggctcgtgatcttgcaccagaggttgagagattgcttcaatttcgagatccaaatattcggaagaaggcagcattatgctctataaggatcataaagaaagttcccgacttggcagaaaattttatcaaccctgctacttccttactcagggagaagcatcatggggttctgatcactggggttcagctttgtacagatctgtgtaaaattagcactgaagctcttgaacatattaggaagaaatgcacagatggtttggtcagaactcttaaggatctagccaatagtccatattcaccagagtatgatattgccggtatcacagacccatttctccacatcagattgcttaaacttttgcgagtgttgggtgaaggcaatgctgatgctagtgacaccatgaatgacatacttgcccaggtggctacaaagactgagtcaaataaagttgcagggaatgccattttatatgaatgtgttcaaacaataatgagcattgaagataatggtggcttacgtgtacttgccattaatatcctgggaagatttttgtcaaatcgtgacaacaatatcagatatgtggcattaaacatgctaatgaaggctgtaactgctgatgctcaggcagtacagaggcaccgtgcaacaattatagaatgtgtgaaggattcagatgcttcgattcagaaaagagcccttgaacttgtttatgttttggtgaatgaaactaatgtgaagcccttggcaaaagagcttatagattatctggaagtcagtgatcttgatttcagaggggaccttactgccaaaatttgctccattgtagcaaagtattccccagagaagatctggtatattgatcagatgctcaaggttctgtctcaggctggaaattttgtaaaagatgaagtatggtatgccttaattgttgtgataaccaatgcttctgagcttcatggatatacagtaagagcattatacagagcatttcaaatgtcagctgaacaggagactctagttcgagttacagtgtggtgcattggggagtatggtgacatgttagttaataatgttggaatgcttgacatagaagatccaataacagtgactgagttcgatgcagttgatgtcgtagagattgctataaaacgccatgcatcagatcttaccacaaaatcgatggctttggttgcactattaaagctctcttcacgtttcccttcatgttcagagaggatcaaagaaattattgttcagttcaaagggagctttgtgctagaattgcagcagagagctattgaattcaattcgattattgcaaagcatcaaaatattaggtctacacttgtagaaaggatgccagttttggatgaggcaacttccattggtaggagggctgggtctctaccaggtgcagcttcaactccaactgcaccttcatttaatcttccaaatggaacagccaaacctgtggctcctcttgtagatctacttgatctaagttcagatgatgctcctgcacctagctcttctagtggaggagatattcttcaggaccttcttggtgttgatctttcaccagcatcacaacaatctgttgctggccaagcttcaaaaagtggcaacgatgttcttttggatcttttgtctattggatcaccttctgtcgaaagcagctcatctacagtagacatcttatcctccaattcgagtaacaaagcaccagtttcctcgttggatggtctctcatctctttcactttctacaaaaacaacttcaaatgctgctcctatgatggatttattggatggatttgcccccatcccgccaacagaaaacaatggaccggtttatccatctgtaactgcatttgagagcagctccttgaggttgacattcaatttctcaaaacaaccaggaaacccacaaacaacagttatccaggctacttttatgaatttgtcctccaatacatatacagattttgttttccaggcagcagttcctaagtttcttcagttgcacttagatccagctagcagcaatactcttcccgcaaatgggtccataacccaaagtttgaaaattactaatagccaacatgggaagaaatctcttgtcatgcgtataaggattgcatacaagataaatggcaaggatacactggaggaaggacaagttaataattttcctcgtggtttatga

SEQ ID NO: 288 - protein, 871 aa, Glycine max
MNPFSSGTRLRDMIRAIRACKTAAEERAVVRKECAAIRAAINENDNDYRHRNLAKLMFIHMLGYPTHFGQMECLKLIASPGFPEKRIGYLGLMLLLDERQEVLMLVTNSLKQDLNHTNQYIVGLALCALGNICSAEMARDLAPEVERLLQFRDPNIRKKAALCSIRIIKKVPDLAENFINPATSLLREKHHGVLITGVQLCTDLCKISTEALEHIRKKCTDGLVRTLKDLANSPYSPEYDIAGITDPFLHIRLLKLLRVLGEGNADASDTMNDILAQVATKTESNKVAGNAILYECVQTIMSIEDNGGLRVLAINILGRFLSNRDNNIRYVALNMLMKAVTADAQAVQRHRATIIECVKDSDASIQKRALELVYVLVNETNVKPLAKELIDYLEVSDLDFRGDLTAKICSIVAKYSPEKIWYIDQMLKVLSQAGNFVKDEVWYALIVVITNASELHGYTVRALYRAFQMSAEQETLVRVTVWCIGEYGDMLVNNVGMLDIEDPITVTEFDAVDVVEIAIKRHASDLTTKSMALVALLKLSSRFPSCSERIKEIIVQFKGSFVLELQQRAIEFNSIIAKHQNIRSTLVERMPVLDEATSIGRRAGSLPGAASTPTAPSFNLPNGTAKPVAPLVDLLDLSSDDAPAPSSSSGGDILQDLLGVDLSPASQQSVAGQASKSGNDVLLDLLSIGSPSVESSSSTVDILSSNSSNKAPVSSLDGLSSLSLSTKTTSNAAPMMDLLDGFAPIPPTENNGPVYPSVTAFESSSLRLTFNFSKQPGNPQTTVIQATFMNLSSNTYTDFVFQAAVPKFLQLHLDPASSNTLPANGSITQSLKITNSQHGKKSLVMRIRIAYKINGKDTLEEGQVNNFPRGL

SEQ ID NO: 289 - DNA, 2619 bp, Medicago truncatula
atgaatcctttctcttcaggaacgcgtttgagggacatgattcgggccatacgtgcatgcaagactgcagcagaagagcgcggcgttgtaagaaaagaatgcgcagccattcgtgcttcaataaatgaaaatgaccaagactacaggcatcgtaatatggctaagctaatgtttatccacatgcttggatacccaacacatttcggtcaaatggagtgtctcaagttgatagcatcccctggatttccggagaagagaataggttatcttggcctcatgttgcttcttgatgaaagacaagaagttctaatgttggtcaccaattctttgaaacaagatcttaatcatacaaatcagtatatagtgggacttgcactctgtgctttaggaaacatttgttcagcagaaatggctcgtgatcttgcaccagaggttgagagattgctacaatttcgtgatcccaatattcggaagaaggcagcattgtgctctataaggatcataaagaaagttccagacttggcagaaaattttatcaatcctgctacttcattacttagggagaaacaccatggagttttaattactggagttcagctttgtacagatctgtgtaaaactagcacagaagctcttgaacatattaggaagaaatgcacagatggtttggtcagaactctcaaagatctagcgaacagtccttattcgccagagtatgatattgctggcatcacagacccatttctccacattaggttgcttaaacttctgcgagtgttaggtgaaggtgatgctgatgctagtgactctatgaatgacatacttgcccaggtggctacaaaaaccgagtcaaataaagttgcagggaatgccattttatatgagtgtgttcaaacgataatgagcattgaagataacggtggcttacgcgtacttgccatcaatatcctgggaagattcttgtcaaaccgcgacaacaatatcagatacgtggcattaaacatgctaatgagggctgtaactgctgatgctcaggcagtgcagaggcaccgtgcaacaattctagaatgtgtgaaggatttagatgcttcaattcggaaaagagcccttgaacttgtatatgttctggtaaatgaaactaatgtgaagcctttagtgaaagatcttgtagattatctggaagtcagtgatcttgatttcagaggagacctaactaccaaaatatgctccatagttgcaaagttttccccagagaagatctggtacattgatcagatgctgaaggttctgactgaggctggaaattttgtaaaagatgaagtatggtatgccttaattgttgtgataagcaatgcttccgagcttcatggatattcagtaagagcattatacagggcatttcaaacgtctgctgagcaggagactctagttcgagttacagtgtggtgcattggggagtatggtgacatgttagtccataatgttggaatgcttggcatagaagatccaataacagtgactgagtcagatgcagtggatgttgtagagattgctataaaacgccatgcatcagatcttactacaaaagcaatgtctttggctgccttattaaagctctcttcacgtttcccttcttgttcagagaggatcgaggaaattattgtacagttcaaagggaaccttgagctagaattgcagcagagagctattgaattcaactcgattattgctaagcaccaaaatattagatctactcttgtagaaaggatgccagttttggatgaggccactttcataggtaggagggctgggtctttaccaggtgccgcttctacagcaaatgcaccttcagtcagtctcccgaatggggtagccaaacctgcagctcctcttgtagatctacttgatctaagttctgatgatgctccagcacctagctcttctggtggcgattttcttcaggaccttcttggtgttgatctatctccagcatcacagcaatatggtgttggtcaagcatcaaacagtggcacagatgttcttatggatcttttgtcgattggatcgccttctgccccgagcagctcatctacagtagacatcttgtccttaagtgctagtaataatgcacctgcttcaccattggatgatctctcaccacttccaccttcttcaagagctacttcaaatgctggttcaatgatggatttattgggtggtatttcctccagtccggcaacagaaaacaatggaccagtttacccgtctgtaactgcttttgagagcagctccttgaggttgacattcaatttctcaaaacaaccaggaaacccacaaacaacagttatccaagctacctttacaaatttgtcctccaatacatatacagattttgttttccaggctgcagtccccaagtttctacaattgcacttggatccagctagcggcaatactctccctgctgctggaaatgggtcggtcacgcaaactttgagagttactaatagccaacatggaaagaaatctcttgtcatgcgcataaggatagcatacaaggtaaatggcaaagatacattggaggaaggacaaatcagtaattttcccaagggtctgtga

SEQ ID NO: 290 - protein, 872 aa, Medicago truncatula
MNPFSSGTRLRDMIRAIRACKTAAEERGVVRKECAAIRASINENDQDYRHRNMAKLMFIHMLGYPTHFGQMECLKLIASPGFPEKRIGYLGLMLLLDERQEVLMLVTNSLKQDLNHTNQYIVGLALCALGNICSAEMARDLAPEVERLLQFRDPNIRKKAALCSIRIIKKVPDLAENFINPATSLLREKHHGVLITGVQLCTDLCKTSTEALEHIRKKCTDGLVRTLKDLANSPYSPEYDIAGITDPFLHIRLLKLLRVLGEGDADASDSMNDILAQVATKTESNKVAGNAILYECVQTIMSIEDNGGLRVLAINILGRFLSNRDNNIRYVALNMLMRAVTADAQAVQRHRATILECVKDLDASIRKRALELVYVLVNETNVKPLVKDLVDYLEVSDLDFRGDLTTKICSIVAKFSPEKIWYIDQMLKVLTEAGNFVKDEVWYALIVVISNASELHGYSVRALYRAFQTSAEQETLVRVTVWCIGEYGDMLVHNVGMLGIEDPITVTESDAVDVVEIAIKRHASDLTTKAMSLAALLKLSSRFPSCSERIEEIIVQFKGNLELELQQRAIEFNSIIAKHQNIRSTLVERMPVLDEATFIGRRAGSLPGAASTANAPSVSLPNGVAKPAAPLVDLLDLSSDDAPAPSSSGGDFLQDLLGVDLSPASQQYGVGQASNSGTDVLMDLLSIGSPSAPSSSSTVDILSLSASNNAPASPLDDLSPLPPSSRATSNAGSMMDLLGGISSSPATENNGPVYPSVTAFESSSLRLTFNFSKQPGNPQTTVIQATFTNLSSNTYTDFVFQAAVPKFLQLHLDPASGNTLPAAGNGSVTQTLRVTNSQHGKKSLVMRIRIAYKVNGKDTLEEGQISNFPKGL

SEQ ID NO: 291 - DNA, 2613 bp, Oryza sativa
atggacctcgccatcaaccccttctcctccggcacccgcctccgggacatgatacgggcgatacgcgcgtgcaagacggcggcggaggagcgggcggtggtgcggcgggagtgcgcggcgatacgggcggccatcagcgagggggaccaggactaccgccaccggaacatggccaagctcatgttcatccacatgctcgggtaccccacccacttcggccagatggagtgcctcaagctcatcgccgccgcgggcttccccgagaagcgcatcgggtacctcggcctcatgctgctgctcgacgagcggcaggaggtgctcatgctcgtcaccaactcgctcaagcaagatcttaaccactcgaaccagttcattgtggggcttgcactctgtgctcttggcaacatttgctccgctgaaatggcgcgtgatctgtcacctgaggtggagaggctattgcaaagtagggaaccaaataccaagaagaaggctgccttatgctctataaggatcgtacggaaggttccagatttggcagagaacttcatgggctctgctgtttcactactgaaggaaaaacatcacggggttctcatatctgctgttcagctctgcgcagaactttgtaaagcaagcaaagaggcattggagtacctgaggaagaactgccttgatggtttggtcagaatactgagagatgtgtccaatagttcatatgctcctgaatatgacattgctggaattacggatccgttcttgcatatcagagtgcttaagctcatgcgaattttgggtcaaggagatgcagattgcagtgagtttgtgaatgatattcttgctcaggttgcaacaaaaactgagtcaaataagaacgcaggaaatgctattttatatgaatgtgttgagactataatgggcatcgaagctactagtggtttacgtgtgctggcaatcaatatcttgggtagatttctgtccaaccgtgataataacatcagatatgttgctctgaacatgcttatgaaggccatggaggtagacacgcaagcagtgcagaggcatagagcaacaatattagagtgtgtcaaggatgctgatgtatctattcgcaaaagggcccttgaacttgtttaccttcttgtcaacgatgcaaatgcaaaatctttgaccaaggagcttgttgattacctggaagtaagtgatcaggacttcaaggacgacctcacagcaaagatatgctcaattgttgaaaagttttcccaagataaactttggtacttagaccagatgttcaaggttttatctctggctggaaattatgtgaaggacgatgtatggcatgctctaatagtcttaataagcaatgcatctgaactccaaggatactcagtgagatcattatacaaggcattgctagcttgcggtgaacaggaaagtttggttagggtagctgtatggtgcattggtgagtatggtgaaatgctggtgaacaatgttggtatgctggacatagaggaaccaatcacggtaacagaatctgatgccgtggatgctgtagaggtctctcttaaacgatactctgcagacgtgacaactcgggctatgtgtctagtatctctcttgaagctctcttcccgattcccaccgacttcagagaggataaaggaaatagttgcacagaataaagggaatactgtgcttgaactacaacagaggtcaattgaattcaactccattatacagaggcatcagtctataaaatcatctttgcttgagcggatgcctgtgatagatgaagctagttacttggctaagagagctgcttccacacaagcaactatttcatcagataaattagctgctgcagcaactcctggaagctcgcttaagcttccaaatggtgtagcaaagccaccaccggctcctctagctgatttgcttgatttaagttctgacgatgctcctgcgactacttccgcccctactacagcacctaatgatttcctacaggatcttttgggcataggcttgactgatacatctacagcaggtggagctccatcagcaagcacagatattctgatggatcttctatcaattggttcttctccagtacaaaatggcccaccaacagtatcaaactttagccttcctggtcaagctgagactaaagttgcacctgttacaccccaagttgtggatcttcttgatggtttgtcctcaagcacatctctttctgatgagaatacagcttacccgccaatcacagctttccagagtgcagctttgaagatcactttcaattttaagaagcagtctggaaaacctcaggagactacaattcatgctagctttacaaatttgacatctaatacattcacggatttcatctttcaggcagctgtaccaaagtttatccagttgcgtttggaccccgctagcagcaacacgcttcctgccagtggaaatgattctgttacacaaagcctcagtgtcacaaataaccaacatggacagaaaccccttgcgatgcgtatccggataacttacaaagtgaacggtgaggacaggctggagcaagggcaaatcaacaattttcctgctggattgtag

SEQ ID NO: 292 - protein, 870 aa, Oryza sativa
MDLAINPFSSGTRLRDMIRAIRACKTAAEERAVVRRECAAIRAAISEGDQDYRHRNMAKLMFIHMLGYPTHFGQMECLKLIAAAGFPEKRIGYLGLMLLLDERQEVLMLVTNSLKQDLNHSNQFIVGLALCALGNICSAEMARDLSPEVERLLQSREPNTKKKAALCSIRIVRKVPDLAENFMGSAVSLLKEKHHGVLISAVQLCAELCKASKEALEYLRKNCLDGLVRILRDVSNSSYAPEYDIAGITDPFLHIRVLKLMRILGQGDADCSEFVNDILAQVATKTESNKNAGNAILYECVETIMGIEATSGLRVLAINILGRFLSNRDNNIRYVALNMLMKAMEVDTQAVQRHRATILECVKDADVSIRKRALELVYLLVNDANAKSLTKELVDYLEVSDQDFKDDLTAKICSIVEKFSQDKLWYLDQMFKVLSLAGNYVKDDVWHALIVLISNASELQGYSVRSLYKALLACGEQESLVRVAVWCIGEYGEMLVNNVGMLDIEEPITVTESDAVDAVEVSLKRYSADVTTRAMCLVSLLKLSSRFPPTSERIKEIVAQNKGNTVLELQQRSIEFNSIIQRHQSIKSSLLERMPVIDEASYLAKRAASTQATISSDKLAAAATPGSSLKLPNGVAKPPPAPLADLLDLSSDDAPATTSAPTTAPNDFLQDLLGIGLTDTSTAGGAPSASTDILMDLLSIGSSPVQNGPPTVSNFSLPGQAETKVAPVTPQVVDLLDGLSSSTSLSDENTAYPPITAFQSAALKITFNFKKQSGKPQETTIHASFTNLTSNTFTDFIFQAAVPKFIQLRLDPASSNTLPASGNDSVTQSLSVTNNQHGQKPLAMRIRITYKVNGEDRLEQGQINNFPAGL

SEQ ID NO: 293 - DNA, 1694 bp, Physcomitrella patens
atgactactgggagtagattattggacatgatacggtccattcgagcttgtaaaactgcagctgaggagagaagtgtagttgcaaaagagtgcgccttacttcgaaatgcttttaaagataatgaccaggattatcgacaccgcaacgttgccaagcttatgttcatccatatgctgggctatcccactcactttggtcagatggaatgcatcaagttgatcgctgcaggctcctttcctgagaaaagaattggttacctgggtctcatgttactgcttgatgagcgccaggaagtgttgatgttggttaccaattctttgaaaaatgacttgggccacaccaatcagtttattgttgggttaggactttgcgctctcggcaatatttgtaccgctgaaatggctagggatcttgctccagaagttgaaaaacttttacaaagcaacaactcctacattcgtaagaaggcagcgttgtgttccgtgaggatcgttcggaaggtgccggaccttgttgagtatttgacggttccagctacaggacttctcacagacaagcatcatggggttctggtagcaggagtaaagctttgtacagagctttgtcaatccaacgagctagcccttgaacattttaggaagcatgtgtcgacaatggtccgggtgctgaagaacctggttgtcagtggttatgctcctgagtatgatgtcagtggaattacagacccctttttacaaatcaggcttcttagattgctgcgcctacttgggaatggtgatgccgatgtcagcgatgcaatgagtgatgtccttgcgcaggttgcaacgaacacagaaagcaacaagaatgcgggcaacgctattttatacgagtgtgtacagacaatcatggccgtagaggctattggaggccttcgcgtattggctatcaacattttgggtcgctttttggctaatcgtgataacaatataagatatgtagcattgaacacccttgtcaaggtcgtatcagtcgatactcaagccgtccagcggcatcgtacgacgattgttgaatgtgtgaaggattcagatatttccattagaagacgagctttggagcttgtctgtgctttggtgaatgaaaacaacgtcaaggttttaacaaaggagttggttgaatatctgaaagtcagtgatcctgactttaagggagacctcactgcaaggatagctggacttgttcaaaaatttgcgccaaacaagcagtggtacattgatcagatgatattgctcatggttgaggctgggaaatatgttaccaatgaagtgatcaggtctttggtagtcgttataagcaatgcaaatgatcttcaaggctatgttgttcgaaccctttaccgagtatttcaagcgtgggatgggcaggaaagtcttggacaagtcactgtttggtgtattggtgagtatggagagtttttaattaacagtgctaatgaattggaaggcgaagatccactcactgttgcagaatcagacgctgtggatgttgttgaaagtgtcttaaaagactcgagagtaacacccaccacagtagcatttgcacttacggcgcttctgaaactctcaactcgtttacctacctgtgcagaccgcatcaagaacttgattttagaacataaaggaagtttggtactggagttgcaacaacgggc

SEQ ID NO: 294 - protein, 885 aa, Physcomitrella patens
MTTGSRLLDMIRSIRACKTAAEERSVVAKECALLRNAFKDNDQDYRHRNVAKLMFIHMLGYPTHFGQMECIKLIAAGSFPEKRIGYLGLMLLLDERQEVLMLVTNSLKNDLGHTNQFIVGLGLCALGNICTAEMARDLAPEVEKLLQSNNSYIRKKAALCSVRIVRKVPDLVEYLTVPATGLLTDKHHGVLVAGVKLCTELCQSNELALEHFRKHVSTMVRVLKNLVVSGYAPEYDVSGITDPFLQIRLLRLLRLLGNGDADVSDAMSDVLAQVATNTESNKNAGNAILYECVQTIMAVEAIGGLRVLAINILGRFLANRDNNIRYVALNTLVKVVSVDTQAVQRHRTTIVECVKDSDISIRRRALELVCALVNENNVKVLTKELVEYLKVSDPDFKGDLTARIAGLVQKFAPNKQWYIDQMILLMVEAGKYVTNEVIRSLVVVISNANDLQGYVVRTLYRVFQAWDGQESLGQVTVWCIGEYGEFLINSANELEGEDPLTVAESDAVDVVESVLKDSRVTPTTVAFALTALLKLSTRLPTCADRIKNLILEHKGSLVLELQQRAIEFGSILTKHSELKATLLERMPVLDEATYSAKNEMGVDGQQTAAAVASESDANGHLKQPNGIGKQPAATANLMDLLSFTDEQPSTSSNSSGNALLDLLGNGPLDGSNSLTSSAKHSAGGADMLLDLLSLDGPAPPTSAPTSTAAAPLAGLLDVDPLGNIPLGNLSLSGGTPRGPPAVVDPFANLTSTAMLASVPSPDPAPGFPTIVAMQTSGLKISFDFTKPADSPKTTIIKAFYSNLSSNPYTDFVFQAAVPKFMQLQLEPATSGILPANSTNSVTQLIRLTNNMHGQKALVMKLRVSYKANGNNVLEQGQVNNFPAGL

SEQ ID NO: 295 - DNA, 2634 bp, Populus trichocarpa
atgaattcgttcttttccggtacgcgtcttagggacatgattcgggcaatacgggcttgtaaaacggcggcggaggaaagagctgttgtgagaaaagaatgtgctgcaattcgaacgtcgattaatgaaaatgatcaagattatagacaccggaatttggcaaagcttatgtttattcatatgcttggctacccaacacattttggtcaaatggagtgcttaaagttgattgcctccgccggatttcctgaaaagaggatcggatatctcggcctcatgttacttcttgatgaaagacaagaagttctaatgctcgttaccaactcgctaaaacaagatcttaatcattcaaaccagtatattgtgggacttgcactttgtgctttgggaaatatttgttcagcagaaatggctcgtgatcttgcaccagaagtggaaagattgctgcaatttcgggatccaaatattcggaaaaaggctgcattatgctctatacggattattaggaaagtcccggatctggcagaaaattttataaatcctgcggctgccttactaaaagagaagcatcatggagtcttaataacgggaattcaactctgtacagatttatgtaaagtcagtccggaagccctcgagtttttgagaaagaaacacacagaagggttggtcagaactttaaaggatgttgttaacagtccatatgcaccggaatatgacattgccggtatcgcggacccttttctccatgtcagattgctcaaacttttgcgtgcgttgggccaaggagatgctgatgctagtgatgccatgaatgacatacttgctcaggtggcaacaaaaactgagtcaaacaaaaatgctggaaatgctattctatatgaatgtgttgaaactatcatgagcattgaagataatggtggcctacgagtgcttgctattaatatcctgggaagatttttgtctaaccgtgacaataatatcagatatgttgcattaaacatgctgatgaaggctattactgtagatgctcaagctgtacaaaggcatcgggcaacaatcttggaatgtgtaaaggattcagatgcttcaatcaggaaaagggcccttgaacttgtttacgttctggtgaacgagaccaatgtaaaacctttgacaaaagagctaattgattatctggaagtaagtgatgaagaatttaaaggggatcttactgccaaaatttgctccattgttgagaagttctcccctgagaaaatttggtacattgatcagatgctcaaggttcttgctgaggctggaaactttgtaaaagatgaagtatggcatgcccttattgttgtgataagcaatgcttccgaccttcatggatatacagtcagggcattgtacaaagctttccaaacatcttctgagcaggaaagccttgttcgcgtagcagtttggtgcattggggaatacggtgacatgttgatgaataatgttggaatgcttgccatagaggatcctgtaactgttacggagtctgacattgtggatgttgttgagattgctttaaagcaccatgccttagacctcactactaaagcaatggctctgattgctctcttaaaactttcttcccgtttcccatcttgttctgaaaggatcaaggatataattgttcaccataaaggcagccttgtgcttgaattgcagcaaagatcccttgaatttaattccatcattgagaagcatcaaaatataagatctacactggtcgaaaggatgccaattttggatgaggctactttcactacaaggagggctggttctttgccagcagctgtttcaacttctggtggggcttcccttaatcttccaaatggagttgtgaagccctccacagctcctcttgtagatttacttgatctttcagatgatgttccagcagcacccggctcttctggtggtgattttcttcaggatcttctaggtgttgatttgtcaccagctccaacacaatcaggcacaaaccaggttcaaaaagctggcacagatgttctactggatctattgtcaattggagtgcctcctgtacaaagcagctcatctacaactgacattttatcacccattcaaaatgaaaaatcaccaatagccacattagatgcactctcgtcatcttcttcaccttctgcacaagcaacttcttctgctagagctgctccaatgatggatttgttggatggcttcggtcccagcccatcaaaacctgagaataatggttcagtttatccacctttcgtggcatttgagagcagctctttgagaataacattcaacttctcaaagcaaccaggaaacccgcaaacaacattagtccaggcaactttcacaaacttgacacccaatgtcttcaccgattttatatttcaggcagcagttccaaagtttcttcaactgcacctagacccagctagcagcaatattcttcctgcaagtggtaatggatccattacacaaaatatgagagttactaataaccaacacgggaagaaatccctcgtgatgcgcacaaggatatcatacaagatcaacaacaaagatacactggaggaaggacacataaacaatttcccgcgtgagttgtga

SEQ ID NO: 296 - protein, 877 aa, Populus trichocarpa
MNSFFSGTRLRDMIRAIRACKTAAEERAVVRKECAAIRTSINENDQDYRHRNLAKLMFIHMLGYPTHFGQMECLKLIASAGFPEKRIGYLGLMLLLDERQEVLMLVTNSLKQDLNHSNQYIVGLALCALGNICSAEMARDLAPEVERLLQFRDPNIRKKAALCSIRIIRKVPDLAENFINPAAALLKEKHHGVLITGIQLCTDLCKVSPEALEFLRKKHTEGLVRTLKDVVNSPYAPEYDIAGIADPFLHVRLLKLLRALGQGDADASDAMNDILAQVATKTESNKNAGNAILYECVETIMSIEDNGGLRVLAINILGRFLSNRDNNIRYVALNMLMKAITVDAQAVQRHRATILECVKDSDASIRKRALELVYVLVNETNVKPLTKELIDYLEVSDEEFKGDLTAKICSIVEKFSPEKIWYIDQMLKVLAEAGNFVKDEVWHALIVVISNASDLHGYTVRALYKAFQTSSEQESLVRVAVWCIGEYGDMLMNNVGMLAIEDPVTVTESDIVDVVEIALKHHALDLTTKAMALIALLKLSSRFPSCSERIKDIIVHHKGSLVLELQQRSLEFNSIIEKHQNIRSTLVERMPILDEATFTTRRAGSLPAAVSTSGGASLNLPNGVVKPSTAPLVDLLDLSDDVPAAPGSSGGDFLQDLLGVDLSPAPTQSGTNQVQKAGTDVLLDLLSIGVPPVQSSSSTTDILSPIQNEKSPIATLDALSSSSSPSAQATSSARAAPMMDLLDGFGPSPSKPENNGSVYPPFVAFESSSLRITFNFSKQPGNPQTTLVQATFTNLTPNVFTDFIFQAAVPKFLQLHLDPASSNILPASGNGSITQNMRVTNNQHGKKSLVMRTRISYKINNKDTLEEGHINNFPREL

SEQ ID NO: 297 - DNA, 489 bp, Brassica napus
atggctcctattgctgtcggcgatgttgtaccagaaggaactatctccttctttgatgagaatgatcagcttcagagcgcctccgttcacactctcgccgctggtaagaaggtcattctcttcggtgtccccggtgctttcactcccacatgcagcatgcagcatgtgcctggattcattgagaaagccgaggagctgaaatcaaagggtgttgatgagatcatttgcttcagcgtgaacgatccatttgtgatgaaggcgtggggaaagacataccctgagaacaagcacgtgaagtttgtggcagatggttcaggagaatacacacagcttcttggactcgagcttgacctcaaggacaagggtcttggtgttaggtcaaggagattcgctctgctgctcgataacctcaaggtgactgtggccaatgttgaatccggtggcgagttcacggtttccagcgctgatgatatcctcaaggctctctaa

SEQ ID NO: 298 - protein, 162 aa, Brassica napus
MAPIAVGDVVPEGTISFFDENDQLQSASVHTLAAGKKVILFGVPGAFTPTCSMQHVPGFIEKAEELKSKGVDEIICFSVNDPFVMKAWGKTYPENKHVKFVADGSGEYTQLLGLELDLKDKGLGVRSRRFALLLDNLKVTVANVESGGEFTVSSADDILKAL

SEQ ID NO: 299 - DNA, 489 bp, Gossypium hirsutum
atggctccgatcgctgtcggcgacgtgttaccggacggtactctctcctacttcgacgccgatgataagctccagcaggtgtccgtacattccctggctgccggtaaaaaggttatcatctttggcgttcccggtgcctttacccctacttgcagcttgaagcatgttcctggattcatcgagaaagcaggggagctgaaatccaagggcgttgatgaaattatttgcattagcgtgaatgacccctttgtgatgaaggcatgggccaaaacttaccctgagaacaaagatgtcaagtttctagctgatggttcagcaacatacacccatgcccttggtcttgagctcaaccttggcgataaaggtctcggcactcggtctaggaggttcacactcttggtcgatgacctcaaggtgaaggcagcaaatgtcgaatctggaggggagtttaccgaggcaagggctgatgatatgcttgaagctctatag

SEQ ID NO: 300 - protein, 162 aa, Gossypium hirsutum
MAPIAVGDVLPDGTLSYFDADDKLQQVSVHSLAAGKKVIIFGVPGAFTPTCSLKHVPGFIEKAGELKSKGVDEIICISVNDPFVMKAWAKTYPENKDVKFLADGSATYTHALGLELNLGDKGLGTRSRRFTLLVDDLKVKAANVESGGEFTEARADDMLEAL

SEQ ID NO: 301 - DNA, 489 bp, Glycine max
atggctccaattactgtcggcgatgttgtaccagacggaactatctctttcttcgatgaaaatgatcagcttcagaccgtctccgttcactctatcgccgccggtaaaaaagtcattctctttggtgttcctggtgctttcactcccacatgcagtatgagccatgtgcctggattcattgggaaagcagaggagctgaagtcaaagggtattgatgagatcatttgctttagtgtgaatgatccatttgtgatgaaggcatggggaaaaacatatccagagaacaagcatgtgaagtttgtagcagatgggtctggagaatacacgcatcttcttggacttgagcttgaccttaaggacaagggtcttggtattaggtcaaggagattcgctttgttgcttgataaccttaaggtgactgtagccaatgttgaatctggtggcgagttcacggtttccagcgcagaggatattctcaaggctctttaa

SEQ ID NO: 302 - protein, 162 aa, Glycine max
MAPITVGDVVPDGTISFFDENDQLQTVSVHSIAAGKKVILFGVPGAFTPTCSMSHVPGFIGKAEELKSKGIDEIICFSVNDPFVMKAWGKTYPENKHVKFVADGSGEYTHLLGLELDLKDKGLGIRSRRFALLLDNLKVTVANVESGGEFTVSSAEDILKAL

SEQ ID NO: 303 - DNA, 489 bp, Hordeum vulgare
atggctccgattggcgtgggcagcaccctccccgacgggcagctcgggtggttcgacgagaacgaccagctgcagcaggtctcgatccactccctggccgccggcaagaaggtcatcctcttcggcgtccccggcgccttcacccccacctgcagcaatcagcatgtaccaggcttcattactcaagctgaggatctcaaagccaagggtgtagaggagattcttcttgtcagcgttaatgacccctttgtcatgaaggcatgggcaaagacatacccagagaacaagcatgtgaagttccttgctgatggagcggcagcatacacaaaagcacttggtcttgagcttgatctcacggagaagggattgggtcttcgttcgaagcgctttgctctccttgctgacgacctcaaggtcaccgtcgcaaacatcgaggaaggaggccagttcacaatctctggtgctgaagagatcctcaaggcactgtag

SEQ ID NO: 304 - protein, 162 aa, Hordeum vulgare
MAPIGVGSTLPDGQLGWFDENDQLQQVSIHSLAAGKKVILFGVPGAFTPTCSNQHVPGFITQAEDLKAKGVEEILLVSVNDPFVMKAWAKTYPENKHVKFLADGAAAYTKALGLELDLTEKGLGLRSKRFALLADDLKVTVANIEEGGQFTISGAEEILKAL

SEQ ID NO: 305 - DNA, 489 bp, Medicago truncatula
atggctccaatcaaagtcggagatgtgatcccagatggcaccttagccttccttgatgaagaaaacaaacctcaatctgtcaccattcattccctctctgctggcaaaaaagtcatcatctttgctgttcctggtgccttcacccccacttgcagcttgaagcatgttcctggcttcattgagagatcagaagagctgaaaggaaagggagttgatgaaatcatctgtatcagtgtcaatgatccatttgtgctgaattcatgggccaagacattcccagagaacaagcatgtcaagttccttgctgatggttctgccaaatacacacatgctcttgggttggagcttgacctcagcgacaaaggtcttggcattcgctccaagaggtttgctcttcttgttgaagacttgaaggtgaaggttgcaaatgttgaagaggggggagaatacaccatctccggtgctgaagaaatcatcaaggctctttga

SEQ ID NO: 306 - protein, 162 aa, Medicago truncatula
MAPIKVGDVIPDGTLAFLDEENKPQSVTIHSLSAGKKVIIFAVPGAFTPTCSLKHVPGFIERSEELKGKGVDEIICISVNDPFVLNSWAKTFPENKHVKFLADGSAKYTHALGLELDLSDKGLGIRSKRFALLVEDLKVKVANVEEGGEYTISGAEEIIKAL

SEQ ID NO: 307 - DNA, 489 bp, Oryza sativa
atggccccggttgccgtgggcgacaccctccccgacggccagctggggtggttcgacggggaggacaagctgcagcaggtctccgtccacggcctcgccgccggcaagaaggtcgtcctcttcggcgtccccggtgccttcaccccgacctgcagcaatcagcatgtgccaggattcataaatcaggctgagcagctcaaagccaagggtgtagacgacatcttgcttgtcagtgttaacgacccctttgtcatgaaggcgtgggcaaagtcataccctgagaataagcatgtgaaattccttgccgatggtttgggaacatacaccaaggcacttggtcttgagcttgacctttcggagaaagggcttggtattcgttcgagacggtttgctctccttgctgacaacctcaaggttactgttgcaaacattgaggaaggtggccaattcacaatctctggtgctgaggagatcctcaaggcactgtaa

SEQ ID NO: 308 - protein, 162 aa, Oryza sativa
MAPVAVGDTLPDGQLGWFDGEDKLQQVSVHGLAAGKKVVLFGVPGAFTPTCSNQHVPGFINQAEQLKAKGVDDILLVSVNDPFVMKAWAKSYPENKHVKFLADGLGTYTKALGLELDLSEKGLGIRSRRFALLADNLKVTVANIEEGGQFTISGAEEILKAL

SEQ ID NO: 309 - DNA, 492 bp, Physcomitrella patens
atggcccccattgcagtgggtgatacgatccccgacgtgacgctatcctacttggacgatgacaaccagagccagaagctcagcacgcaccaggatttgaaaggcaagaaagtgatgcttgttgctgttcctggcgcattcactcccacttgcagccaggaacacgttcccggtttcatcgacaatgccaaggagatcaagagcaagggtgtgtcggacatcatcgtcgtctcagtgaatgacccgttcgtcatgaaggcatgggagcgttcctatgatggtgctgaacacctcaagtttgtggccgatggttctctagagttcaccaaggcgttgggattggagctggacttgaccgacaagggattgggcgtacgttctcgtagattctgtctactggtcgatgacttggttgtgaaggttgcgaacattgaggaaggaggtgcattcacagtttccggagctgaggaaatcttgaaggcgctcgtgtga

SEQ ID NO: 310 - protein, 163 aa, Physcomitrella patens
MAPIAVGDTIPDVTLSYLDDDNQSQKLSTHQDLKGKKVMLVAVPGAFTPTCSQEHVPGFIDNAKEIKSKGVSDIIVVSVNDPFVMKAWERSYDGAEHLKFVADGSLEFTKALGLELDLTDKGLGVRSRRFCLLVDDLVVKVANIEEGGAFTVSGAEEILKALV

SEQ ID NO: 311 - DNA, 483 bp, Populus trichocarpa
atggctccgattgctgtcggtgatgtcttgcctgatggaaagctcgcttatttcgacgaacaagatcagctccaggacgtgtctgtacactctcttgctgccggtaaaaaggtcatcctctttggtgttcccggtgccttcacccccacttgcagcttgaagcatgtgccagggtttgttgagaaagcagaggagcttaaatccaagggggttgctgaaattttgtgcatcagcgtgaatgacccctttgtgatgaaagcatgggcaaaaacttaccctgagaataagcatgtcaaattcctagctgatggatctgcaacatacacccatgctcttggccttgagcttgacctgcaagagaagggacttggcacccgttctaggaggtttgctctcttggtcgatgacctcaaggtgaaagctgcaaatattgaaggtggtggagaattcactgtgtccagtgctgatgatatcctcaaggat

SEQ ID NO: 312 - protein, 162 aa, Populus trichocarpa
MAPIAVGDVLPDGKLAYFDEQDQLQDVSVHSLAAGKKVILFGVPGAFTPTCSLKHVPGFVEKAEELKSKGVAEILCISVNDPFVMKAWAKTYPENKHVKFLADGSATYTHALGLELDLQEKGLGTRSRRFALLVDDLKVKAANIEGGGEFTVSSADDILKDL

SEQ ID NO: 313 - DNA, 489 bp, Solanum lycopersicum
atggctccaatcgccgttggtgacgtcatccccgatggtaccgtatcttacttcgacgagcaagatcagatgcagaccgtctcagtatactcacttgctaagggcaagaaggtcatcatcttcgccgttcccggagctttcactcccacttgcagcatgaagcatgtgcctggctttattgaaaaggctgctgagttgaagtcaaagggtgtcgatgaaatcctctgcatcagtgtcaatgacccctttgtgatgaaggcctgggcaaaaacttaccctgagaacaaacatgtaaaatttcttgctgatggagctggaaaatacacccatgcccttgggctggagcttgatctgtcggataaggggcttggtgttcgatcacgaaggtatgctcttttggttgatgaccttgaggtgaaagtagctaacattgaatctggaggggagttcacggtctccggtgctgatgaaatcgtcaatgctctttaa

SEQ ID NO: 314 - protein, 162 aa, Solanum lycopersicum
MAPIAVGDVIPDGTVSYFDEQDQMQTVSVYSLAKGKKVIIFAVPGAFTPTCSMKHVPGFIEKAAELKSKGVDEILCISVNDPFVMKAWAKTYPENKHVKFLADGAGKYTHALGLELDLSDKGLGVRSRRYALLVDDLEVKVANIESGGEFTVSGADEIVNAL

SEQ ID NO: 315 - DNA, 489 bp, Triticum aestivum
atggctccgattggcgtgggcagcaccctccccgacggccagctcgcgtggttcgacgagaacgaccagatgcagcaggtctccatccactcgttggccgccggcaagaaggtcatcctcttcggcgtccccggtgccttcacccccacctgcagcaatcagcatgtaccaggcttcattactcaggccgaggagctcaaagccaagggtgtagatgagatcctgcttgtcagcgttaatgacccctttgtcatgaaagcatgggcgaagacatacccagataacaagcatgtgaagttccttgctgatggagcggctgcatacacaaaagcacttggtcttgagcttgatcttacggagaaaggattgggtcttcgttcgaggcggtttgctctccttgctgacgacctcaaggtcaccgtcgcaaacgtcgaggaaggtggccagttcacaatctctggtgccgaggagatcctcaaggcactgtag

SEQ ID NO: 316 - protein, 162 aa, Triticum aestivum
MAPIGVGSTLPDGQLAWFDENDQMQQVSIHSLAAGKKVILFGVPGAFTPTCSNQHVPGFITQAEELKAKGVDEILLVSVNDPFVMKAWAKTYPDNKHVKFLADGAAAYTKALGLELDLTEKGLGLRSRRFALLADDLKVTVANVEEGGQFTISGAEEILKAL

SEQ ID NO: 317 - DNA, 489 bp, Zea mays
atggctcccatcgctgtcggcgacgccctccccgacggccagctcgggtggttcgacgagaacgaccagctgcagcaggtctccgtccacgcgctcgccgccggcaagaaggtcatcctcttcggcgtccccggcgccttcaccccgacctgcagcaaccagcatgtgccaggcttcatcacacaggctgagcagctcaaagccaagggtgtagacgagatcctgcttatcagcgttaacgaccccttcgtcatgaaggcgtgggcgaagacctaccccgagaacaagcacgtgaagttcctcgccgacggatctggagcgtacaccaaggcgctcgacctcgagctcgatctcacggacaaaggtctgggcgtgcgctcgaagaggttcgctctcctggccgacgacctcacggtcaccgtcgcaaacatcgaggaaggcgggcagttcacgatctctggcgctgaggagatcctgaaggcgctttag

SEQ ID NO: 318 - protein, 162 aa, Zea mays
MAPIAVGDALPDGQLGWFDENDQLQQVSVHALAAGKKVILFGVPGAFTPTCSNQHVPGFITQAEQLKAKGVDEILLISVNDPFVMKAWAKTYPENKHVKFLADGSGAYTKALDLELDLTDKGLGVRSKRFALLADDLTVTVANIEEGGQFTISGAEEILKAL

SEQ ID NO: 319 - DNA, 1116 bp, Brassica napus
atgccgccgactgatgctgagttcgatcccaaagtgttgcctcagtccgcgacgggcgactacacattcgcgaacgtggacaatctggagcattgtgcaaagtacttgaaccagacgatggttacatttggattcccggcctcgctcgatctcttctccaacgatccggtttctatctcgaggacctgtaattgcatgtactcgttgcttcagcagcgacagcgcgacttggagttcagagaatctgctaatgagctgaggcagagacaacaatcggatatagctagacttgaagctaaagttgagaggctcgatgcgcagctccaacacaaggacagggaaatcgcaacgattactagaacagaagcgaaaaacacagcggctttgaagtcgcagattgaaaagctacagcaggagagagatgagttccaaagaatggtgatcggtaaccagcaagtcaaagctcaacagatccatgaaatgaagaaaaaggaaaaggattacattaaattacaggaacggttgaatcaagtattgatggagaaaaagaaagaatcgaaatcaggaatggagatcatgaatttgctacagaaagaagggaggcagcgtgggacctggaatggcaagaagactgatactgacttctacaaaaagatagtggatgcatatgaagcaaaaaaccaagagttaatggctgagaacacaaacctaagagcactgcttcgatccatgcagacagatatgcgtgatttcttaaacgctccaaacgggtcagctaatccttcattggctggcaacgagaaacgtgaggccgatccttcacaatctccactgggtggaaagacggatgtctttgatctacctttccgtatggctagaggtcaaatagaagaaagtttgcgcactaagatggcttccataaaggaacgcatggttcagttacaagatgcacctaaaggagcatctgtcacttctgaagcaacagagagagagcttgaacttgaagctcagctagccgaggcaagaagcataatccaagaacaggagtccataatgtgtaaacacctcccaaaatcagagcagcgaaagggaatccatggttccattgacagctga

SEQ ID NO: 320 - protein, 371 aa, Brassica napus
MPPTDAEFDPKVLPQSATGDYTFANVDNLEHCAKYLNQTMVTFGFPASLDLFSNDPVSISRTCNCMYSLLQQRQRDLEFRESANELRQRQQSDIARLEAKVERLDAQLQHKDREIATITRTEAKNTAALKSQIEKLQQERDEFQRMVIGNQQVKAQQIHEMKKKEKDYIKLQERLNQVLMEKKKESKSGMEIMNLLQKEGRQRGTWNGKKTDTDFYKKIVDAYEAKNQELMAENTNLRALLRSMQTDMRDFLNAPNGSANPSLAGNEKREADPSQSPLGGKTDVFDLPFRMARGQIEESLRTKMASIKERMVQLQDAPKGASVTSEATERELELEAQLAEARSIIQEQESIMCKHLPKSEQRKGIHGSIDS

SEQ ID NO: 321 - DNA, 1137 bp, Glycine max
atgcctcccactgacggagacttggatcttaggccaccttctcaatcttccttcacagccggcgactacacgttcgccgatgcggacaatttggagcattgcgctaagtatctcaaccaatcgctcgtcacgtttggtttcccggcttcgctcgatctcttcgcaaatgaccccgtttcaattgcgaggacttgcaattgcatttacgtcttgctgcagcagagacagcgcgacgtggagtttagagagtctgctaatgatcaaagacaacgactgttgtctgacatttcgagattggaggccaaagtggagaggcttgaaggtcaactacaagtcaaagacagggagatagcgactattactagaacggaagctaaaaacactgcagctctgaaggcccaaattgagaagctgcaacaggagagggatgaattccagagaatggttattggtaatcagcaagtaaagactcaacaaatgcatgagatgaagaagaaggaaaaagaatacataaagttgcaggagaggctaaaccaagtgttgatggagaagaagaaagagtctaggtcaggcatggagataatgaatttgcttcagaaggaagggaggcaacgtggaacatggaatgggaagaaagctgacaatgatttttataaaaagattgtggatgcttatgagtcaaaaaatcaagaactgatggcagagaatgctgatttaagagcattattgagatcaatgcaggtggatatgcgtgatttcttaaatgctcctaatggactaccaaagcaatctttcactggcaatgaaagagttgaaagtgatccttcacaatctccattggttgggaaaatggatgtatttgaccttccttttcacatggccagagatcaaatagaagaaagtcttcgcaacaaaatggcttctataaaggagcgtatggttcaattgcaagatgctcaaaaagaagcagaagttacttcagaggctactgagagggaacttgagcttgaagctcaacttgtcgaagcaaggagcatcatacaggagcaggcatcaataatgtctaaacatcttgcaaaatctgacaggccaagggaatctatcatcccagcaccggctgaggcagtatgcaattaa

SEQ ID NO: 322 - protein, 378 aa, Glycine max
MPPTDGDLDLRPPSQSSFTAGDYTFADADNLEHCAKYLNQSLVTFGFPASLDLFANDPVSIARTCNCIYVLLQQRQRDVEFRESANDQRQRLLSDISRLEAKVERLEGQLQVKDREIATITRTEAKNTAALKAQIEKLQQERDEFQRMVIGNQQVKTQQMHEMKKKEKEYIKLQERLNQVLMEKKKESRSGMEIMNLLQKEGRQRGTWNGKKADNDFYKKIVDAYESKNQELMAENADLRALLRSMQVDMRDFLNAPNGLPKQSFTGNERVESDPSQSPLVGKMDVFDLPFHMARDQIEESLRNKMASIKERMVQLQDAQKEAEVTSEATERELELEAQLVEARSIIQEQASIMSKHLAKSDRPRESIIPAPAEAVCN

SEQ ID NO: 323 - DNA, 1218 bp, Medicago truncatula
atgccttccactgaaggagacttagatcttaggccatcttctcattctgctttcacaaccggagaatacacattcgccgatgtaaacaatttggaacattgtgctaagtatctgaaccaatcactcgttacatttggttttcccgcttcactcgatctattctcaaacgatcccgtttctatagcgaggacgtgcaattgcatatacttcttgcttcagcagagacagcgtgatgtcgaatttagagagtctgccaatgaacaaagacaacgattgttgtcggatatatcgagatatgaggctaaagttgagagacttgatggacaattacaagctaaagatagagagatagcgacgataactagaacggaagctaaaaatactgcagctctcaaggctcaaattgagaagctgcaaaaagagagggatgaatttcagaggatggttattggcaatcagcaagttaggactcaacaaatacatgagatgaagaagaaggaaaaggaatacattaagttgcaggagagactaaaccaagtgttgatggagaagaagaaagaatctaggtcgggcatggagataatgaatttgcttcagaaggaagggaggcaacgtggaacatggaatgggaagaaaactgacaatgatttttataaaaagattgtggacgcttatgaggtgaaaaatcaagaactgatagcagaaaatgctgatttaagggcattattgagatcaatgcaggttgatatgcgtgatttcttaaatgctcctaatggactaccaaatcaatctcccactactaacgaaagatctgaaagtaatccttcacattctccgctggttggaagaacggacgtatttgatcttccttttcacatggcaagagatcaaattgaagagagtctaagagcgaagatggcttctataaaggagcgcatggtccaactgcaagatgctcagaaagaggccgaagtcacttcggaagctaccgagagagaacttgagcttgaagctcaacttgttgaagcaaggagcattatacaagagcaggcttctataatgtctaaacatcttgcaaagtctgacaggccaagtaaattgatttactctttgaattttacagggaatcggctccggctgaggggtagtgctagactgggagcacatgttggtgtagaaacggtgttgatgatggcatttagcatcaaccttttgtga

SEQ ID NO: 324 - protein, 405 aa, Medicago truncatula
MPSTEGDLDLRPSSHSAFTTGEYTFADVNNLEHCAKYLNQSLVTFGFPASLDLFSNDPVSIARTCNCIYFLLQQRQRDVEFRESANEQRQRLLSDISRYEAKVERLDGQLQAKDREIATITRTEAKNTAALKAQIEKLQKERDEFQRMVIGNQQVRTQQIHEMKKKEKEYIKLQERLNQVLMEKKKESRSGMEIMNLLQKEGRQRGTWNGKKTDNDFYKKIVDAYEVKNQELIAENADLRALLRSMQVDMRDFLNAPNGLPNQSPTTNERSESNPSHSPLVGRTDVFDLPFHMARDQIEESLRAKMASIKERMVQLQDAQKEAEVTSEATERELELEAQLVEARSIIQEQASIMSKHLAKSDRPSKLIYSLNFTGNRLRLRGSARLGAHVGVETVLMMAFSINLL

SEQ ID NO: 325 - DNA, 1197 bp, Oryza sativa
atgtccgcctcctcgcgcttcgatctccgggcctcgtcgcacccgcaccagcacgccatcggaggcggaggcggaggcggaggcatgagtgacggtggcggtggcgcggcggcggcgttcgcggacgcggggaacctcgagcactgcgccaggtacctcaaccagacgctcgtcaccttcggcttcccggcctcgctcgatctcttcgccaccgaccccgtatcgattgcgagaacgtgcaactgcatctatgctcttcttcagcagcggcagcgtgatattgagttccgggagtctaccaatgatctgcgtcagcgtatgcagtctgatatttctagattagaagccaagattgaaagaatggatgctcaattagctgcaaaagatcgcgagctggccacattgactagaacggaggccaaaaacactgcaactttgaaggctcagattgacaagctgcaacaggaacgcgatgagttccaaaaaatggttattggcaatcagcaagtacgtacccagcaaattcatgaaatgaagaaaaaagagaaagaatacatcaaattgcaggagaagttaaaccaggtattaatggagaaaaagaaggaatcatcacgttcaggaatggaaataatgaacttgttgcagaaagaaggacggcagcgtggaacttggagtggaaaaaagaatgacaatgattattacaaaatgattgttgatgcctatgaggtaaagaagcaagagttgatgcaagaaaatgctgatttgcgagcactattgcgttcgatgcagatggatatgcgcgagttcctcaatgctccaaatggagttccacagccagctgttgtgggcaatggacgacaggaggcaggatctcctcagtctccacttggtggcaagacggatgtctttgatttgccctttcacatggctagagaccagattgaagagagtttgcgcactaaaatggcttccataaaggcccgaatgacacaacttcaagatgcccaaaagggtgcagaagtgacatcagaagctaccgagcgggaacttgaacttgaagctcaactagttgaagctagaagcattatccaggagcaggcatccctcatgtccaagcactttacgaagtctgataaaccaaggaggttgagtggattggatgctgagcgtgaggcggttgcagctcaggaggtgtaa

SEQ ID NO: 326 - protein, 398 aa, Oryza sativa
MSASSRFDLRASSHPHQHAIGGGGGGGGMSDGGGGAAAAFADAGNLEHCARYLNQTLVTFGFPASLDLFATDPVSIARTCNCIYALLQQRQRDIEFRESTNDLRQRMQSDISRLEAKIERMDAQLAAKDRELATLTRTEAKNTATLKAQIDKLQQERDEFQKMVIGNQQVRTQQIHEMKKKEKEYIKLQEKLNQVLMEKKKESSRSGMEIMNLLQKEGRQRGTWSGKKNDNDYYKMIVDAYEVKKQELMQENADLRALLRSMQMDMREFLNAPNGVPQPAVVGNGRQEAGSPQSPLGGKTDVFDLPFHMARDQIEESLRTKMASIKARMTQLQDAQKGAEVTSEATERELELEAQLVEARSIIQEQASLMSKHFTKSDKPRRLSGLDAEREAVAAQEV

SEQ ID NO: 327 - DNA, 1266 bp, Physcomitrella patens
atggggttaaccgacgttgatggtggttacgggggtttatatgattctagcgacgtgtttggggatgatacttttgcagacattcacaatttggaccactgcattaagtatctcaaccagtctttagttacatttggctttccatcaggactagatctttactccagtgaaccatcttcaatcgtgcgaacatgcaactgcatatatgccatgattcagcagcgacagcgggacatcgaatatcgtgaagcagccaatgactcgaggcaaaggctaatgtcagatatgtcccggcttgaagctaaggtggaaaggcttactgatcagctggcaagtaaagaacgtgaattgcaagcaatcacaagcaaggagcaaaaagcggcagctactagcagagctcaaattgagaagctccagcatgagaaagatgagtttcaaaggatggtgattagtacacagcaagttaaagctcagcagatgcatgaactgaagaagaaagagaaagagtatatcaagttgcaggaacggttgaatcaagtattaatcgaaaagaagaaagattctaagaatggtattgagatcatgaatttattacagcagaaagagggcaggcaacgggggacttggaacaccaagaaagcagatggtgatttctataagatgatagtggatgcttatgaaacaaagaagcaagatcttgtggctgaaaatttggaattgcggggtttgcttcgatctatgcaggatgacatgcgtgattttttgaacaccccgagtgggctgattagacctggcactggagtaagctctcacgaacatgaaccacctgccacacccctgggaggccgaacggatgtattcgacctaccttttcatatggcgagagatcagattggagaaagcttacgtgctaaaatgtctaccattaaagaacgaatgatgcagctgcaagaaagtcaaaagttacttgatgcaggaagagaaactagtgagcgcgagcaagctcttgaggcgcagcttctagaggcccgcagcattatttctgaacaggctagtctaatgaacaaacacatgtcggaggaggatgacagcagtcacgtcattgcaaagttaatggagtcggaaaataaagcaagtactgcacagggcataaatttgtattttcaatcgatggtccgaatcatactgggatgttgcgaacaggaagaggagcgaatatcaaagataaagacatttgacgggacaattttatccaaggtattctaa

SEQ ID NO: 328 - protein, 421 aa, Physcomitrella patens
MGLTDVDGGYGGLYDSSDVFGDDTFADIHNLDHCIKYLNQSLVTFGFPSGLDLYSSEPSSIVRTCNCIYAMIQQRQRDIEYREAANDSRQRLMSDMSRLEAKVERLTDQLASKERELQAITSKEQKAAATSRAQIEKLQHEKDEFQRMVISTQQVKAQQMHELKKKEKEYIKLQERLNQVLIEKKKDSKNGIEIMNLLQQKEGRQRGTWNTKKADGDFYKMIVDAYETKKQDLVAENLELRGLLRSMQDDMRDFLNTPSGLIRPGTGVSSHEHEPPATPLGGRTDVFDLPFHMARDQIGESLRAKMSTIKERMMQLQESQKLLDAGRETSEREQALEAQLLEARSIISEQASLMNKHMSEEDDSSHVIAKLMESENKASTAQGINLYFQSMVRIILGCCEQEEERISKIKTFDGTILSKVF

SEQ ID NO: 329 - DNA, 1146 bp, Populus trichocarpa
atgccaacttctgatactgacttcgatctcagctcctctcccgcatctgccttctcaatcggagagtatacatttgctgatgtgaataacttggagcattgtgcaaagtacttgaaccagactcttgttacctttggtttccctgcctctcttgatcttttcgctaatgatccggtttcaaccgcccgaacctgcaactgcatttactctttgcttcaacagaggcagcgcgacgttgaatttagagaatctgccagtgagcagagacagagactactatcagatatatcgagattggaagctaaggttgagaggcttgagtcgcagttacaagccaaagatagagagatagcgacaataactagaacggaagccaaagctacagcagcttttaaggcccaaattgaaaagcttcaacaagaacgtgatgaatttcaaaggatggtaattggtaatcagcaagtgaggactcaacaaatacatgaaatgaagaaaaaagaaaaggagtacataaagttgcaggagaggctaaaccaagtgttaatggagaaaaagaaggaatcacgatcaggcatggagataatgaatttgcttcagaaagaagggcggcagcgtgggacatggaacggaaagaaggctgataatgatttctacaagaaaattgtggatgcttgtgaggctaaaaatcaagagttaatggcagagaataatgatttaagggcattgctgcggtcaatgcaggttgatatgcgtgacttcttcaatgcaccaaatgggtcatccaaacaatctccacctgccaatgagagacttgtaacagacccctcacaatctcccttgggtgggaggacggatgtgtttgacttgccttttcacatggctagagatcaaattgaagaaagtctccgaaccaagatgtcttccataaaggagcgtatggttcaactacaagatgcacagaaaggagcagaagtcacctctgaagcgactgagagagaactagagctcgaagctcaacttgttgaggcaagaagcataatccaggagcaggcatctataatgtctaagcatcttgcgaagtcagagaggccaagggaatctatcatctcttcaccagctgaggtagtacgagaccaacggggttga

SEQ ID NO: 330 - protein, 381 aa, Populus trichocarpa
MPTSDTDFDLSSSPASAFSIGEYTFADVNNLEHCAKYLNQTLVTFGFPASLDLFANDPVSTARTCNCIYSLLQQRQRDVEFRESASEQRQRLLSDISRLEAKVERLESQLQAKDREIATITRTEAKATAAFKAQIEKLQQERDEFQRMVIGNQQVRTQQIHEMKKKEKEYIKLQERLNQVLMEKKKESRSGMEIMNLLQKEGRQRGTWNGKKADNDFYKKIVDACEAKNQELMAENNDLRALLRSMQVDMRDFFNAPNGSSKQSPPANERLVTDPSQSPLGGRTDVFDLPFHMARDQIEESLRTKMSSIKERMVQLQDAQKGAEVTSEATERELELEAQLVEARSIIQEQASIMSKHLAKSERPRESIISSPAEVVRDQRG

SEQ ID NO: 331 - DNA, 1170 bp, Zea mays
atgtcctcgtcggcgcgtttcgatctccgggcctcgtcgcatcagttgcagccgccgccgtcgcacgccagcatgagcagcgacgggggcgcgttcgcaaacgcggagaacctggagcactgcgcccggtacctgaaccagacgctcgtcaccttcggattcccggcatctctcgacctcttcgccaccgatccggtctcgattgcaagaacttgtaactgcatctatgcgctgctgcagcagcgacagagggacattgagttcagggagtctacaaatgaccagcggcagcggatgcaatctgatatctcacggctggaagctaagatagagagaatggatgctcaattagcagcgaaagatcgagagctagccactcttactcgaacggaggccaaaaacactgctgctctgaagtctcagattgataagctgcaacaagaacgtgatgaatttcagaaaatggttataggaaatcagcaagtacgcacccagcaaattcatgaaatgaagaagaaagagaaagaatacataaagttgcaggaaaagctaaatcaggtattgatggagaagaaaaaggaatcatcccgttctggaatggagataatgaacttgttacagaaagaaggacgacaacgcggaacatggaatggaaaaaagaacgacaatgattattacaaaatgattgttgatgcatatgaagtgaagaaacaagagctgatgcaagagaatgcagatttacgggcactgttacgttcaatgcagatggacatgcgtgactttctcaatgccccgaatgggtcatcacaatctactgttactgataatggaagacaggagtcagggtctcctcagtctccgcttggtggcaagacggatgtttttgacttgccctttcatatggccagagatcagatagaagagagtttgcgcacaaaaatgacttcaatcaaggcacgaatgacacaacttcaagatgctcagaaaggtgcagaagtgacttctgaggcaactgaccgggagcttgagcttgaagctcaactggttgaagcaagaagcatcatccaagagcaggcctgcatcatgtccaagcacttcaagtctgataagccaagtggcaggaggcatagcggtctggatggcgagcgtgaggcatctgccgaggtgtaa

SEQ ID NO: 332 - protein, 389 aa, Zea mays
MSSSARFDLRASSHQLQPPPSHASMSSDGGAFANAENLEHCARYLNQTLVTFGFPASLDLFATDPVSIARTCNCIYALLQQRQRDIEFRESTNDQRQRMQSDISRLEAKIERMDAQLAAKDRELATLTRTEAKNTAALKSQIDKLQQERDEFQKMVIGNQQVRTQQIHEMKKKEKEYIKLQEKLNQVLMEKKKESSRSGMEIMNLLQKEGRQRGTWNGKKNDNDYYKMIVDAYEVKKQELMQENADLRALLRSMQMDMRDFLNAPNGSSQSTVTDNGRQESGSPQSPLGGKTDVFDLPFHMARDQIEESLRTKMTSIKARMTQLQDAQKGAEVTSEATDRELELEAQLVEARSIIQEQACIMSKHFKSDKPSGRRHSGLDGEREASAEV

SEQ ID NO: 333 - DNA, 519 bp, Brassica napus
atgtcgtcttcttcttcacataatattgagctggaggcagctaagtttctgcacaagctcattcaagattccaaagatgaaccttcgaagctagccacaaaactctatgtgatattgcagcacatgaaaaccagtgggaaggaacactcaatgccgtatcaagtcatatcaagggcaatggagactgtggtcagtcaacatggtcttgacattgaagctttgacgtcccctcgtcttcctcatgctggtggtagtagtacccaaatggaagattctggatctgcacatattgctggatcttctcaagtcgttggagttaacaatgagcccaaagcaagtctagttgaaaatgagacgtcaaaatatgatgcattcacttctgctaggcagcttggtggatcaaccagtgcatcacaagccgtttaccaagggcctggaactcgaagtaacagatccttcgatcatgacagtccatccagcttggattctaagccggggaaatgcccagtctcacgatag

SEQ ID NO: 334 - protein, 172 aa, Brassica napus
MSSSSSHNIELEAAKFLHKLIQDSKDEPSKLATKLYVILQHMKTSGKEHSMPYQVISRAMETVVSQHGLDIEALTSPRLPHAGGSSTQMEDSGSAHIAGSSQVVGVNNEPKASLVENETSKYDAFTSARQLGGSTSASQAVYQGPGTRSNRSFDHDSPSSLDSKPGKCPVSR

SEQ ID NO: 335 - DNA, 324 bp, Gossypium hirsutum
atggcgtcttcttcgcatcatgttgagttggaggccgcaaagtttctgcacaaactcattcaagattctaaagatgagccagtgaagctagcaactaaacttcatgtgatattgcaacatatgaaagctagtggaaaggagcattcaatgccgtttcaagtaatatcaagggcaatggagactgttatcaatcaacatggtcttgatcttgaagctttgaagtcatcacggcttcctccaacagcgggaccgcaaacattagatgctacatctggacaatattctggatcttcccagggtgttgcagtttccaaaggattctaa

SEQ ID NO: 336 - protein, 107 aa, Gossypium hirsutum
MASSSHHVELEAAKFLHKLIQDSKDEPVKLATKLHVILQHMKASGKEHSMPFQVISRAMETVINQHGLDLEALKSSRLPPTAGPQTLDATSGQYSGSSQGVAVSKGF

SEQ ID NO: 337 - DNA, 9096 bp, Glycine max
atggcctcttcacataatgttgaattggaggctgctaagtttctgcataaacttattcaagattctaaagatgaaccagccaagctggctactaaactctatgtgatactacaacacatgaaatcaagtgggaaggagcattcaatgccatatcaagtgatatcaagggcaatggagactgtcatcaaccaacacggtcttgatattgaagcattgaagtcatcacgtcttcctttgactggtggtcctcaaataggatcttcttcacagtcagtgaatgtaacaaaagattccagagtgggtttggctgaaaatgaggtgtccaaaatggacccgtttgcttcaggtcggccaccggttgccccaagtggtggagcgcctgattattatcaaggatctgtggcacagaggagtagtcagtcttttgatcaaggaagtccatctagtttggattctaggtctgctaactctcagtcacaagatagacgtgatactgccaattgggacaaacaggtgagtcaaaaggatggcaagaaagctacaacaaagagaaagaggggagatacatcatcacctgtggaactgcatgttgacagtccttctcagctggatcctcgcaatactgttaaaaatggtgaactaaccaactttaacatgactccaaatagtggtcaaatggagaatgtttcggctttgtctggtagcatgaggacaatgcttagagcaaaccaagaaggccatcatttattggcaaaacaaactgatttgacaaaggttggcaatccgatggtgcgagcacctaattcaaagtatgcagaagacactgaagtttcctctgcacatattgcttcagggaagcagcaagcacgccttagttgtgaccactttggtgcttgtctgaagtacaaccttgagggtgatggtttagtggaacaacagttaaaacagcttcgagctcagtgccttgttttcctagcatttagaaatggtctagcaccaaaaaaactacatcttgaaattgcacttggaactgccttttctagagaagatggttctcgcaaagatctaattgacctcaaaggaaaatcacaatcttttaatgaaccaggtaactcatctggggccatgatgccatttggaggtcccagcaatgccagacagacggataaaaaccttttggggtcctcttcagttggcaaaattgtggaggctgattctttgtcaaagggaactgagagcccaagaatgttggaggacaaaggtaacctacatgtcacaaaaagaggagaggttgatagacgaattcaagaaagagtggcttcacaagcttcctcagccacttcatgtcagcagcaagattcttcaagtacaaggggtgctttagttggaagatccaaccaatcttctgttgctggcccaaataactgggccggttttgctggtgctaatgaggcttcaaagggacctcctcaggtctctgctattcaacatgagttgcctatagaaagaagagagaatattcctagtcagtttcaaaatgttgagcaatggaaacctgttccagggatggacagtgatcctcatggagcaaccatgatgaaggatggaaatgtaatgataaaacatgtttctccagagcaagatgggaatgagaggttggtatcagctgattttccaccttctccaaaatatacaatgtcagagagatggatcatggatcagcagaaaaagaggcgtctactcgagcaaaattggatgctaaaacagcagaaaacaaagcaaagaatggctacaagttttcacaagttgaaggaaaatgtgagctcctctgaagatatttctgctaagaccaaaagtgtcatagagttgaaaaaacttcaactattagagcttcaacgtcgtctccggagtgattttctgaatgattttttcaaaccaattgcaaccgagatggaacatttaaaatcaattaagaaacataggcatggtaggagggtcaaacaacttgaaaggtttgagcagaaaatgaaggaagagcgtcagaagcggattcgtgagaggcagaaggagtttttcagtgagatagaggttcacaaggaaaaacttgatgatgtattcaaaatcaagagggaacggtggaagggtttcaatagatatgtgaaggagttccataaaagaaaagaacgtattcatcgtgagaagattgatagaatccagcgggaaaagattaatttactgaaaataaatgatgtggagggctatcttcgaatggtgcaggatgcaaaatcagatcgtgtaaagcaactacttaaagagaccgagaagtatcttcaaaagcttgggtccaagctacaggaagcaaagactgcagcaggacgttttgggcaggatgttgatgagacaggaaatgtcagttttcttgagaatagcgaaacagaaaatgtggatgaaagtgatcaggcaaaggcaaatatatccactacgttgcaggaaacaaattcgagaaagtgcagcagtggcacaactgaaactgctgtaacaatatgccattatatggaaagcaatgaaaagtattacaagatggctcacagtataaaggagagcattgcagagcagccatctagtttgcaaggcgggaaattgagggaatatcaaatgaatggcctgaggtggctggtttccctatacaacaatcatttgaatggaattcttgctgatgaaatgggactgggtaaaacagtacaggttatttctttaatttgctatctgatggaggcaaaaaatgatagaggaccgtttctcgtggttgtgccctcttcagttctacctggttgggactcggaaataaacttttgggctcctggtgttcataaaattgtctatgctggtccaccagaggaaaggcgtcggttattcaaggaaaggattgttcaacagaaattcaatgttcttttgactacgtatgaatatttgatgaataagcatgatagaccaaagctgagcaaaatacattggcattatataataattgatgaaggccaccgcataaagaatgcttcttgcaagttgaatgctgacttgaaacactatcagagctctcacagattgctgttaactggaacacctttacagaacaatcttgaagaactatgggcactacttaatttcttgttaccaaacatattcaattcatcagaggacttctctcaatggtttaataagccatttgagagtgctggagatagctcgcctgatgaagctttattgtccgaggaggagaatctcttgattataaatcgtctgcaccaagttttgagaccatttgtacttaggaggctgaaacacaaggttgaaaatgagttgcctgagaagattgagagactaataagatgtgaggcctcatcatatcaaaaacttttgatgaagagggtggaagaaaatcttggttctattggcaattcaaaggctcgatcagtacacaactctgtcatggagcttcgtaatatatgcaatcatccatatctcagtcagcttcatgcagaggaggtggataacttcatacctaaacattatctgccaccaattattagactttgtgggaagcttgagatgttggaccgtttattgccaaaattgaaggcgacagatcatcgggttcttttcttttcgacaatgactaggcttttggatgttatggaggaatacttaactttgaaacagtatcggtacctccggttggatgggcatacatcaggaggtgatcgtggtgctctgattgatctatttaaccaacctggttccccatattttattttcttgctcagcattcgggctggtggtgttggagtgaatcttcaggctgctgacacagttgatctgcaagctcaagcaagggctcatagaattggtcaaaagagggatgttcttgttcttcggtttgaaacggttcaaactgttgaagaacaagtcagggcttcggctgagcacaaacttggagttgctaatcagagcattactgctggttttttcgacaataatacaagtgctgaagatcgaagagaatacttggaagcactcctgcgtgagtgtaagaaagaagaggctgcacctgttttggatgatgatgctctaaacgatgtcttagcccgcagtgaatcagagttggatatatttgaggctgttgacaaaaaaaggaaggaagatgagctggctacatggaagaaattgatgcttggacaggcagctgatggttccgatattcctcaacttcctgctcgtctggtcactgatgaagacctgaaacagttctatgaagcaatgaagatatctgatgtgcctaaggctgaggtagaatctagtggagtaaagagaaagggtggatatattgggggccttgatactcaacactatggcaggggaaaacgtgctagagaggtacgttcctatgaagagcaatggacagaagaggagtttgagaagatgtgtcaggttgaaactccagattcacccaacaaagtaaaagaagtggcagaaaagagttgtccaacaaatacttccagctctgtggtatctacttctaacttacaacctgtgcctgtgcctccagcggtcccaacattgccagctgtggagagtttgccggtagtggtacagcaagttaaagagataaccccacccgccaaacgtggtcggggaagacctaaaagaataacttcagataagtcaccagctgtagtggtctctccagtaacttctggaactgttgaagtagacacacagttacagaaaggatttgggtctggacatttagcatcgtcaactcctgattctgttgctcattctgctgaagtttctgtcattcctatgcctactattccaccaaattctcaggtagctgctgttcctgtttctgtacctattcaagcaagagggcaagggaggaaaagtcatggtggggaagggattagacgtagagggaagaagcaggtcatgatttcacctgcaatccctgttggttctgttggtcctgatctaaaggttaatgataaattggaagataaattggtcagtccttcaggtcaagctatatcccagagtgaaactgttcccagctttgctgcagagccccatccaccttctgcttctttgagcagtggaaaggatcctttgggtgttggggttgttttgaattctcaagcaccccctcctttgccctctaatacaaccttggttcaaactgcacccacttatccgtccgtacagatgctaagtaaaggacaaaatcagaagtcacaaactggagtttcccgtcgtaggggaaagaaacaggcaacaatattagcaccggttccggatcttttacatcaggatttacatcaaactgctaatttgccgatttcatcaggcagtatatcaggtgaaaaagccactgaattaaagagcttgcaagagagcaatgttcaagaatcaaaatgtgttgtcctggatcaagcatcacagagcgtaggtgatcaggatttaaaatcactgggaggatcagatgattcatccaaacagacagtgatcatgtcttcatgtcaagatagtatgattaaatctccaggacaagatcttgacacggttaaaaatcctgatgctcatgattcttctgtaaaggttgttaaatcttctgaaattacctcatcgaaaattgatgaagtttgcaataactcggggaatgaaactttacttggcacaacagtgcctgttactggggtgatacaggatcaacattcaggtggtaaaactcataatcaaactgttgaaatttcaaaaaccatcccttcagttgttgatactccaattaattccttgactgacaatgaaactacacaaagcatcaacaagtctttagatcctgtgactccaacgattgttcccagtacattaactactgtttatcccacgccaggttctgaatctactcatccaggcttggctgaatccattcccaccaaaaggcaaggtcgtaaaactcaaaatagagcagagccaccacggcgtaagggaaaaaaatcagctgcagtgttacctgttgttcctgatgctgttactggtcaggatcctaagttaagtcatcatgcacaaaattcaccagtagattcattgccggggaaagccactgccaatatcactcaaacccaagcattggagatccttttacccagtggagtactacagaaagttgcatcaacaaggattgatgttttctctggaacttgcttaccaaagcctaaagctcatgattctgctgggagtgaagataggaacacacctgttgtacctgtactgactaaagctgcagtggatgtcgcttccaataaccagagtttggaggatagagcgtgttctaatatagcagctactggtgcagcatgccttgcttcaaatgttcctgtgaatgttagcgaaaaacaaccagaaatggcatccaatatggataatttggagggtaaagcaagtttagatatgccaactactggagaacatagcctgacatcagatgttaaagaaaaggctgaacagatgcaacattctgttgaaagctcaaccacgagttgtaaaatagctctagatacaactctcaatgctgtccaaaagatcgatggttcttctgagagacttccaactggctctgctctcaatgatttaaatatagatagttctagccatcagatgtgttcatcttcaggatgcccaccaactccattggaaccagacagttttagcaataatcctgtaactagtcaggctgatacctgcactcggagccattcatcctcaaacaaacctcctgataccacagaacacatttctaatgaaaaattggaacccttgcaaccatctttgaaatcttcatctcttgcttgtgttgacggctctgggttattggttcagactgaaaatttgggtgatcaaccacaagtgatcccatcatgttctgcaacagatcttcctccaatggcgatgatagtttctagtatttcagaatatactgaagttaaaaatgaaactgagtctactttaaaaccttctactgaactctcatctgatgaggggattgttgggtataaaattcctgcttctcagttgctggagcccgaggatcggattgcatttgaacataattctcaaatggcattagaaccctccacgaaacagtgtttagaatctgcttctgaaatgaaagttcctgtgagtcctaaagctgttgaagttcagaagcatccagatgcactagaacctgctgatttgcatggtactccattgattgagagttgcccaaaatctctctgtgaagaaaaaagggatgatagggtttccaaatgtgaacagcttcagtcttgtgttgttgaacctataaatattgaccctgtttcccaagaaaatatagtattatccaatcctattaacaatccaaagactgattcttccgaggcttgccatatggaaatggacacatcagacaggtcagtgttgccacaaccttcttctggtttggaagctgtagggaatgagttagtagatatttctggtgttggcagtcttttagagggaagtaaatccgaagctgcagttctgcccccgtcaaccttgatagaagaacaaaataggggatcagctgtaacatgcccagttaggagttcagaacctttggaggagtcaatggagaagggtgtggctaacaactctgcagttcaggaggaagcaaaagttgataaagtagaaactgatgttcaaatggattcttccattagtcagactttgcaagtaaaacatgaaatttttcaagcaaatgtgaatttgccctcccatctgatggcgaaggaagaaaacatagaagtctcatcctcaaggcccctatctatcagttcatctccatcacatgaattgaaggattctgaacttgaactaggtgataaatatatatctccggttggtgattttcagactgaatctaaagataatatgttgaagagcttggatttagtttcatctccttccgttaggaaggaagaagggatcagttctacatctgatattgatggttctgaaggcctttcgatgtctctgaatgttcatcaattaataactgtcccagatgctgtcgagtcttcatcgtcccaagtgaaagaggaaaaaaagattggggtatcttctgacagtaaattagttgtgaggtctgtatctgaaaatgacatggaaggatctggtcttttgccagaaaaccctgtgctggaaatcaataaaatgtcatcagattcctcaacgattgttagccactctgtggaggaaattaaaattggtgatcaaatggatgcttctcatgtctctgagaatgatttagaaaggattacttctaaatgcatggatggccctctttgcagttcccttgcttctagtgaaccaagagatcctttgattgagaatagtagagatggcatcgaggattctgttgcaaatccattaccacaacagaaatcaaaatgttctgaatctgggaaggttgatgagatgaaaacatctgatgttgtcagggttgatccaggactgaagtccaaaatcgcagattttccttcttccttagtgatggagcaagataaagctgctgcatcatatgatagcccactggctgctgcagaaccaaaatattgtttgaccggagagaattgtgaaaatgctaatgaggaaccaaatccttcagaagctgagatcggtaatgaaatgaatgcatctgatgtagctggggttaatacacagctttcatcaagtagcattattgtgccatcatcttccttgatgactgaggatgataatattgtggtgtcatctgacaatggtccacaatgcagtatgcaagtactcaaggaatcgaaagattgtcagactgaagaggggagctgtaaagatgccactgagggtccctctacaaatccagtactgctgcaggaattaattattaattctgaagctgagacatgtaatgaaggcaagacacaggttggttacccctttagactctgcgaaaaccttttatcttggttttacagtcaatag

SEQ ID NO: 338 - protein, 3031 aa, Glycine max
MASSHNVELEAAKFLHKLIQDSKDEPAKLATKLYVILQHMKSSGKEHSMPYQVISRAMETVINQHGLDIEALKSSRLPLTGGPQIGSSSQSVNVTKDSRVGLAENEVSKMDPFASGRPPVAPSGGAPDYYQGSVAQRSSQSFDQGSPSSLDSRSANSQSQDRRDTANWDKQVSQKDGKKATTKRKRGDTSSPVELHVDSPSQLDPRNTVKNGELTNFNMTPNSGQMENVSALSGSMRTMLRANQEGHHLLAKQTDLTKVGNPMVRAPNSKYAEDTEVSSAHIASGKQQARLSCDHFGACLKYNLEGDGLVEQQLKQLRAQCLVFLAFRNGLAPKKLHLEIALGTAFSREDGSRKDLIDLKGKSQSFNEPGNSSGAMMPFGGPSNARQTDKNLLGSSSVGKIVEADSLSKGTESPRMLEDKGNLHVTKRGEVDRRIQERVASQASSATSCQQQDSSSTRGALVGRSNQSSVAGPNNWAGFAGANEASKGPPQVSAIQHELPIERRENIPSQFQNVEQWKPVPGMDSDPHGATMMKDGNVMIKHVSPEQDGNERLVSADFPPSPKYTMSERWIMDQQKKRRLLEQNWMLKQQKTKQRMATSFHKLKENVSSSEDISAKTKSVIELKKLQLLELQRRLRSDFLNDFFKPIATEMEHLKSIKKHRHGRRVKQLERFEQKMKEERQKRIRERQKEFFSEIEVHKEKLDDVFKIKRERWKGFNRYVKEFHKRKERIHREKIDRIQREKINLLKINDVEGYLRMVQDAKSDRVKQLLKETEKYLQKLGSKLQEAKTAAGRFGQDVDETGNVSFLENSETENVDESDQAKANISTTLQETNSRKCSSGTTETAVTICHYMESNEKYYKMAHSIKESIAEQPSSLQGGKLREYQMNGLRWLVSLYNNHLNGILADEMGLGKTVQVISLICYLMEAKNDRGPFLVVVPSSVLPGWDSEINFWAPGVHKIVYAGPPEERRRLFKERIVQQKFNVLLTTYEYLMNKHDRPKLSKIHWHYIIIDEGHRIKNASCKLNADLKHYQSSHRLLLTGTPLQNNLEELWALLNFLLPNIFNSSEDFSQWFNKPFESAGDSSPDEALLSEEENLLIINRLHQVLRPFVLRRLKHKVENELPEKIERLIRCEASSYQKLLMKRVEENLGSIGNSKARSVHNSVMELRNICNHPYLSQLHAEEVDNFIPKHYLPPIIRLCGKLEMLDRLLPKLKATDHRVLFFSTMTRLLDVMEEYLTLKQYRYLRLDGHTSGGDRGALIDLFNQPGSPYFIFLLSIRAGGVGVNLQAADTVDLQAQARAHRIGQKRDVLVLRFETVQTVEEQVRASAEHKLGVANQSITAGFFDNNTSAEDRREYLEALLRECKKEEAAPVLDDDALNDVLARSESELDIFEAVDKKRKEDELATWKKLMLGQAADGSDIPQLPARLVTDEDLKQFYEAMKISDVPKAEVESSGVKRKGGYIGGLDTQHYGRGKRAREVRSYEEQWTEEEFEKMCQVETPDSPNKVKEVAEKSCPTNTSSSVVSTSNLQPVPVPPAVPTLPAVESLPVVVQQVKEITPPAKRGRGRPKRITSDKSPAVVVSPVTSGTVEVDTQLQKGFGSGHLASSTPDSVAHSAEVSVIPMPTIPPNSQVAAVPVSVPIQARGQGRKSHGGEGIRRRGKKQVMISPAIPVGSVGPDLKVNDKLEDKLVSPSGQAISQSETVPSFAAEPHPPSASLSSGKDPLGVGVVLNSQAPPPLPSNTTLVQTAPTYPSVQMLSKGQNQKSQTGVSRRRGKKQATILAPVPDLLHQDLHQTANLPISSGSISGEKATELKSLQESNVQESKCVVLDQASQSVGDQDLKSLGGSDDSSKQTVIMSSCQDSMIKSPGQDLDTVKNPDAHDSSVKVVKSSEITSSKIDEVCNNSGNETLLGTTVPVTGVIQDQHSGGKTHNQTVEISKTIPSVVDTPINSLTDNETTQSINKSLDPVTPTIVPSTLTTVYPTPGSESTHPGLAESIPTKRQGRKTQNRAEPPRRKGKKSAAVLPVVPDAVTGQDPKLSHHAQNSPVDSLPGKATANITQTQALEILLPSGVLQKVASTRIDVFSGTCLPKPKAHDSAGSEDRNTPVVPVLTKAAVDVASNNQSLEDRACSNIAATGAACLASNVPVNVSEKQPEMASNMDNLEGKASLDMPTTGEHSLTSDVKEKAEQMQHSVESSTTSCKIALDTTLNAVQKIDGSSERLPTGSALNDLNIDSSSHQMCSSSGCPPTPLEPDSFSNNPVTSQADTCTRSHSSSNKPPDTTEHISNEKLEPLQPSLKSSSLACVDGSGLLVQTENLGDQPQVIPSCSATDLPPMAMIVSSISEYTEVKNETESTLKPSTELSSDEGIVGYKIPASQLLEPEDRIAFEHNSQMALEPSTKQCLESASEMKVPVSPKAVEVQKHPDALEPADLHGTPLIESCPKSLCEEKRDDRVSKCEQLQSCVVEPINIDPVSQENIVLSNPINNPKTDSSEACHMEMDTSDRSVLPQPSSGLEAVGNELVDISGVGSLLEGSKSEAAVLPPSTLIEEQNRGSAVTCPVRSSEPLEESMEKGVANNSAVQEEAKVDKVETDVQMDSSISQTLQVKHEIFQANVNLPSHLMAKEENIEVSSSRPLSISSSPSHELKDSELELGDKYISPVGDFQTESKDNMLKSLDLVSSPSVRKEEGISSTSDIDGSEGLSMSLNVHQLITVPDAVESSSSQVKEEKKIGVSSDSKLVVRSVSENDMEGSGLLPENPVLEINKMSSDSSTIVSHSVEEIKIGDQMDASHVSENDLERITSKCMDGPLCSSLASSEPRDPLIENSRDGIEDSVANPLPQQKSKCSESGKVDEMKTSDVVRVDPGLKSKIADFPSSLVMEQDKAAASYDSPLAAAEPKYCLTGENCENANEEPNPSEAEIGNEMNASDVAGVNTQLSSSSIIVPSSSLMTEDDNIVVSSDNGPQCSMQVLKESKDCQTEEGSCKDATEGPSTNPVLLQELIINSEAETCNEGKTQVGYPFRLCENLLSWFYSQ

SEQ ID NO: 339 - DNA, 2259 bp, Medicago truncatula
atgaaagaacaaattgggacaaatgagatggcatctccacagaatgtcgagttggaggctgccaagtttctgcataaacttattcaagattctaaagatgagccagtcaagttggctactaaactctatgtgatactacaacatatgaaatccagcggaaaggaacattcaatgccatatcaagtgatatcaagggcaatggagactgtcatcaaccaacatggccttgatattgaagcactgaagtcgtcacgtcttcctttgactggtgttccgcagataggatcttcttcacaagcagtgggtggtgcaaaagattccagaccaagtttggctgaaagcgaggctcccaaaatggaaccctttacttctggtcgaccaccaattgccccaactggcggagctcctgattattatcaaggatctgtagctcagaggagtaatcaatcttttgatcaagaaagtccatctagtttggattctaggtctgctaactcactgtcacaagataaacgtgatactgtcatttgggacaaacaggcgaatcaaaaggatggtaagaaaggtaacacaaaaagaaagaggggtgattccacatcacctgtggaaatgcatgttgacagttcttctctagtagaacctcgcaacactggtgttaatacaaggaaggggaaaatgaccaagactgaaccatcagatggtattccagctaaaagtggtgaaatgacaaactttagcgtggttccaaataacagtcaaatggagaatatttcaactttttctggaaacatgaaaacaatgcttagggcaaacccagaaggtcatcatttattggcaaagcaaactgattcgacaaatattggcaatccaacggggcgggctccaaattcaaagtatccagaagacttggaagtttcctctgctcatattgctcctgggaagcagcaaggtgcatatgctagggttcatggagggatggtggttcctgctaatgtgtctgcaatgaacgaaccagttttctcaagttccatgcaatatggtgttcctcttaatcgtgatggggggagttcaaatactttagctgatgggcatcaaatatctcagattggcaggcaaaatagtggctcagaaatgactatgcttagacaaggtgttccccctagagatacaggaaaatccccagttcctgctgcatcatctactatgcctttcaaagaaaaccagttaaaacaacttcgagctcagtgccttgtttttctagcttttagaaatggtttaccgccaaagaaactacatcttgaagttgcatttggaaccttttttgctagagaagatggttctaataaagattcaaatgaccccaaaggaaaatcacagtcttttagtgagcctggtaacatgccaggtgtcataatgccatttggaagttcgagcaatctaagaccgactgataaaaatccttcagggtcctctgctggaaaatttttagaggctgaatcttttatgaagggaactgatggcacaagattgttagaagacaaaggtaaccttcattctgacatccagacaccttcagaagacagcaaacatcttgccgcaaaaagagatgttgagagacgaatccaagaaagagtcgctgcacaatcttcttcagctactccatatcagcagaaagattcttcaagttcaaggggtattgtagttggtaacagtaatttggatgatagtgacaatggtatcttgacggctggaagagctaaccaaccttctgttgtaggccctaataactggactggatttgctggtcctagcgaggcttcaaagggacctccacaggtctctacttctcaacatgagttacctatagaaagaagagagaatattcctactcactttcagagtgttgtcaacagtcgtggttcctggaatcccaattctgttaatcacttgacttcttattctttgaaagagcactggaaacctgttccagggattgatagcaatcaccacggaggagtaaccacgatgaatggaaatgtattgggcaaaaatgtttctgcagagcaaggaggaaatgataagttagcatcagctgatttgccatctaaaaaatttacaatgtcagagagatggattatggatcagcagaaaaagaggcttctagttcagcaaaattggatgcaaaaacagcagaaagcaaaggaaagaatgacaacatgttttcacaagttaaaggtttgcctttttattgtaacttaa

SEQ ID NO: 340 - protein, 752 aa, Medicago truncatula
MKEQIGTNEMASPQNVELEAAKFLHKLIQDSKDEPVKLATKLYVILQHMKSSGKEHSMPYQVISRAMETVINQHGLDIEALKSSRLPLTGVPQIGSSSQAVGGAKDSRPSLAESEAPKMEPFTSGRPPIAPTGGAPDYYQGSVAQRSNQSFDQESPSSLDSRSANSLSQDKRDTVIWDKQANQKDGKKGNTKRKRGDSTSPVEMHVDSSSLVEPRNTGVNTRKGKMTKTEPSDGIPAKSGEMTNFSVVPNNSQMENISTFSGNMKTMLRANPEGHHLLAKQTDSTNIGNPTGRAPNSKYPEDLEVSSAHIAPGKQQGAYARVHGGMVVPANVSAMNEPVFSSSMQYGVPLNRDGGSSNTLADGHQISQIGRQNSGSEMTMLRQGVPPRDTGKSPVPAASSTMPFKENQLKQLRAQCLVFLAFRNGLPPKKLHLEVAFGTFFAREDGSNKDSNDPKGKSQSFSEPGNMPGVIMPFGSSSNLRPTDKNPSGSSAGKFLEAESFMKGTDGTRLLEDKGNLHSDIQTPSEDSKHLAAKRDVERRIQERVAAQSSSATPYQQKDSSSSRGIVVGNSNLDDSDNGILTAGRANQPSVVGPNNWTGFAGPSEASKGPPQVSTSQHELPIERRENIPTHFQSVVNSRGSWNPNSVNHLTSYSLKEHWKPVPGIDSNHHGGVTTMNGNVLGKNVSAEQGGNDKLASADLPSKKFTMSERWIMDQQKKRLLVQQNWMQKQQKAKERMTTCFHKLKVCLFIVT

SEQ ID NO: 341 - DNA, 1437 bp, Oryza sativa
atggcctcatcccaacaagttgagcttgaggctgcaaagcttcttcagaaactcattcaagagtcaaaggatgaacctgctaaattagcaacaaaactttatgtgatatgccaacatatgaaactaagtggaaaagagcagtcactgccatatcaggtcatatcaagggccatggagactgttgtaagccaacatggaatagatatggatgcgttgcgatcatcgagaatcccattagctggtggtccacaagcaggagattctagtggtgctatgcctaaggataaggagatcattggcagtcaacctcccatggttggtactgatgcatcccaaagtagtgcgcatgctggattatggaattttccatcaggttcagcagatatggcacgtcacagtgcatctatttcaggcagggtcccagcaggaccaaataggagcgatgttgcaggagctgatattcatcaaggctccatgtcacagaagagtggaagatcctctggaatggaaagccctgccagtctgcaaatagaggatactagatctatgaattcacatgattctttgaagtcagatgaaaaaacaagcaaaaaatcatcttctaagagaaaaagagtggatccaaaagcagcaggggacttgcattctgaagacaactcaaaatcagatgccatgtctaccggacaaaatattagaaagggaaaacagcctggcaaagctggtactcagggtcaactttccaggacagtcgaacacgatccatcacatacattacaagttggtaatgctcaggtgccaccgttacccagtggtgcacctttctttagggctcaccaggaaggaccatcagcttcttctgcaaggactatagacaagactaaaccatcaaatccattcacaatggcacaaatttcaaattttgctgaaggactagcttctggcaacattcctgctgagttgcagaaaagtatattgggaggagcaaatctacttaatgctagttttggctggaaccagaatgcacaaggtccagttatgaagaatactcaagggtctgttcccaacctaatgagacctggtgttaatgtcgaagggaaagttaacttaggatcacaaggaacttttaattctatgtctgcatcacaaatggattaccccacagttcctccttatgtgtcttcttcctttggaggtggtccacagtatcttgacaaagggaaagacttgacttcaggcaatactggcagtgaactaaattcttctaaagctggagctcagctggggatcatgcattccaatgcaagaaaggcacggaattgtcagagcacctcagagagctggttcatctcaaatgtctcaaacctctcccagcattccattcaaagagcagcagttgaagcagctcagagcgcagtgcttagtatttcttgcatttag

SEQ ID NO: 342 - protein, 478 aa, Oryza sativa
MASSQQVELEAAKLLQKLIQESKDEPAKLATKLYVICQHMKLSGKEQSLPYQVISRAMETVVSQHGIDMDALRSSRIPLAGGPQAGDSSGAMPKDKEIIGSQPPMVGTDASQSSAHAGLWNFPSGSADMARHSASISGRVPAGPNRSDVAGADIHQGSMSQKSGRSSGMESPASLQIEDTRSMNSHDSLKSDEKTSKKSSSKRKRVDPKAAGDLHSEDNSKSDAMSTGQNIRKGKQPGKAGTQGQLSRTVEHDPSHTLQVGNAQVPPLPSGAPFFRAHQEGPSASSARTIDKTKPSNPFTMAQISNFAEGLASGNIPAELQKSILGGANLLNASFGWNQNAQGPVMKNTQGSVPNLMRPGVNVEGKVNLGSQGTFNSMSASQMDYPTVPPYVSSSFGGGPQYLDKGKDLTSGNTGSELNSSKAGAQLGIMHSNARKARNCQSTSESWFISNVSNLSQHSIQRAAVEAAQSAVLSISCI

SEQ ID NO: 343 - DNA, 729 bp, Populus trichocarpa
atggcgtcttcacaatcttcacaaaatgtggagttggaggctgctaagtttctacacaaactcattcaagattctaaagatgagcccgcgaaactggctacaaaactctatgtgattttgcaacacatgaaatcaagcgggaaggaacattccatgccgtatcaagtaatatcaagggccatggagactgtcatcaatcagcatggtcttgatattgaagctttgaggtcatcacgccttcctttgaccggtggaactcaaatgggggattcttcgactgcacaatatggaggatcttcacaggcagttggagttgggaaagactctaaagctggattggctgaaaatgagatatccaaagttgatccttctgcttccagtaggccccctgctggcccaagtagtgcaggccatgattattatcaaggatctggaactcaaaggagcagccagtcatttgatcatgaaagtccttctagtttggaaactaggtctgccaattcacaatcccaagaaagaggagcgaatcagaaggatggtaaaaaggctgttgctaagaggaagaggggtgattcatctttacacttggaaatgcatgttgagaatccccaacaacttgatcctcgcaataccatagttaatccaaggaaggggaaaatgaacaaggttgactcaccagggagttatgcagttagaggtgcaagggggttctctttcatctgcacatga

SEQ ID NO: 344 - protein, 242 aa, Populus trichocarpa
MASSQSSQNVELEAAKFLHKLIQDSKDEPAKLATKLYVILQHMKSSGKEHSMPYQVISRAMETVINQHGLDIEALRSSRLPLTGGTQMGDSSTAQYGGSSQAVGVGKDSKAGLAENEISKVDPSASSRPPAGPSSAGHDYYQGSGTQRSSQSFDHESPSSLETRSANSQSQERGANQKDGKKAVAKRKRGDSSLHLEMHVENPQQLDPRNTIVNPRKGKMNKVDSPGSYAVRGARGFSFICT

SEQ ID NO: 345 - DNA, 417 bp, Zea mays
atggcttcatctcagcatgttgagatggaggctgcgaaacttctacataaacttattcaggagtcgaaggatgagcctgctaaactagcaacaaaactttatgtgatatgtcagcatatgaaactaagtggaaaggagcaatcactgccatatcaagtcatatcaagggctatggagacagttgtgaaccaacatggaattgatatggatgcattgcgatcatcacgaattccatttgctggtggtcctcaggcaggggattctagtggcgtcatgtcaaaggacaaggaggtcattggtaaccagtctcccatggtcggaagtgatgcttcccaaagtagtggacaatttggattatggcagcttccatcaggttcaaccgatatgataagacatgggggcatctatttcaggtag

SEQ ID NO: 346 - protein, 138 aa, Zea mays
MASSQHVEMEAAKLLHKLIQESKDEPAKLATKLYVICQHMKLSGKEQSLPYQVISRAMETVVNQHGIDMDALRSSRIPFAGGPQAGDSSGVMSKDKEVIGNQSPMVGSDASQSSGQFGLWQLPSGSTDMIRHGGIYFR

SEQ ID NO: 347 - DNA, 6453 bp, Glycine max
atgcagtcatttcaacagcaactgcttagaaaacctgaagggagtgaagcatttttggcatatcaagctggtcttcaaggagtatttgggagtaacaatttcccatctagttccatgcagttacctcagcaatctcgaaaatttgttgatttagctcagcatggctccaaccaggttcaaggtgttgagcagcaaatgctaaatcctgtacaagcagcatactttcagtatgctctgcaggcttcgcaacaaaagtctgctttggcaatgcagtcacagcagcaacctaaagtgggaatgctgggcccttcatctgtaaaggatcaggaaatgagaatgggaaatttgaaaatgcaggatcttatgtccatgcaggcagtgaatcaggtccaagcatcatcatctagaaattcatctgaacattttacttggggggaaaagcgggtagagcaagggcagcagctagcacctgatcagaagagtgaaggaaattcttcaagccagggaccagctgttggaaacttaatgcctggaaatattataagacctgtgcaagctctggcaactcagcagagcatcccgaacactatgaacaaccagattgcaatggctgctcagttgcgggctatgcaagcatgggcacatgaacgaaatattgatctgtcacatcctgcaaatgctaacttaatggctcagctcattccactgatgcaatcaaggatagttcaacaaccaaaggcaaacgatactaacttaggtgcaatgtcatcacctgtccctgtttcaaaccaacaggttacttctccggcagtcgcaagtgagagttcagcacatgctaattcatctagtgatgtgtctgcacaatctggttctgcaaaagccaggcagacggctccacccagccatttgagtccaccaattagtgctggtatagccagtagctctagtgacatggcagcacagcaattcagtcttcatggcagagacgctcaaggatctttgaagcaatcagttctaaccataaatggaatgccttctgtgcatccacagcagtcctctgcaaacatgaacttaggtgcagatcatcctctgaatgtaaaaacttcatcatctggttcagaaccagcgaaaatgcagtacatcagacaactaagccaatctacttctcaggctggaggtctgacaaatgaaggtggatcaggaaatcaccccaaaactcaggggggaccatctcagatgcctcaacaacgaaatggttttaccaaacaacagcttcatgttcttaaggcacaaatactagcatttaggcgtctgaagaaagcagaaggtgcactcccccaagaacttcttcgggccatcattccaccacctcttgatttgcaagtgcagcagccaattcattctgaaggagcacaaaatcaggagaaatctgctggaaatattgtggcagaacacccgaggcagaatgaggtcaatgccaaagattcacagcctatctcatccattaatggaaagaactcttcaaaacaggaagtctttgtcagagatgagaactccactgtaacggcagttcaggtgcaaggcacacctcgtgtgacaaaggaatctgctggaaaggaagagcagcagtctgttgcatgctctgctaagtcagatcaggaaagtgaacatggaattggcagaactcctgttagaaatgagttagtattagataagggaaaagctgttgctgctccccaggcttcagtaaatgacgcaatgcaactcaataaacctgcacaagcaagtgctgtttcccagacaaaggatgtgggatccaccagaaaatatcatggacccctatttgattttcctttcttcaccagaaaacatgattcgtttgggtcatcaatgatgatcaacaacaataatttgtcattggcatatgatgtgaaagagcttctttttgaggaaggcatagaggtccttggcaagagaaggacagagagtttaaagaagattgaaggtttattggcggtaaacttggagaggaaaagaattaggccagatcttgtgttgaggttgcaaattgaagagaaaaaacttcgccttttagatcttcaggcacgtttaagggatgagattgatcaacagcaacaagagataatggcaatgccagataggccataccgcaagtttgttaggttatgtgaacgtcagcgtatggaacttgctagacaagtgcaggcatctcagagagctttaagggagaagcaactgaaatctatatttcaatggcgcaagaagcttcttgaaacacactgggccattcgtgatgcccgtactgctcgcaacaggggggtggccaaatatcatgaaaggatgttgagagagttctcaaaacgtaaggatgatgaccgaaataaaaggatggaagccttaaaaaataatgatgttgacagatatagggagatgttgctggagcagcagactagcatccaaggtgatgctgcagagagatatgctgttctttcaactttcttaacccagactgaagagtatctccataaattaggaagtaagataactgctgctaagaatcaacaggaaggtctttctgaagaagaagtcagagcggcagcagcctgtgctggagaggaagtgatgattagaaatcgttttatggagatgaatgctcctaaagacaattcatctgtcagcaagtattacagccttgctcatgctgtgagtgagaaggttgtatgccaaccatcaatgttacgggcaggaacactaagagactatcaacttgttggtttgcaatggatgctttccttgtataacaacaaattaaatggaattttggcagatgagatgggtcttggcaaaactgtacaggttatggcattaattgcatacttgatggagtttaaaggaaactatggcccacatcttataatagtcccaaatgctgttatggttaactggaagagtgagttgtatacttggctaccgtctgtgtcatgcattttttatgctggagggaaggattaccgatcaaaattatattcacaagagattatggctatgaaatttaatgtcctggtgactacttatgagttcatcatgtatgaccgggcaaggctttcaaaaattgattggaagtatatcataattgatgaagcacagagaatgaaggatagagattcagttctagctcgtgatcttgatagatatcgttgtcaaaggcgcctgcttctgacaggaacacctttgcagaatgatttgaaggaactgtggtcgcttttaaatttacttcttccagaggtttttgacaataagaaagcctttaacgattggttttcaaagccatttcaaaaggaaggtcccactcaaaatacagaggatgattggcttgagactgagaaaaaagttatcattatccaccgtcttcatcagattcttgagcctttcatgctcaggcgtcgtgttgaagatgttgagggttcactaccaccaaaggtctctatagttttacgatgtaagatgtcagctgtccagagtgccatttatgactgggtcaaatcaactggtacccttcgtcttgatcctgagggtgagaacagtaagattcaaaagaatcctcattaccaggcaaaagagtacaagactttaaataacagatgtatggagctacgtaaaacttgcaatcatccatctctgaattacccattacttggtgaattatctacaaattcaattgtaaaatcttgtgggaaattgtggatcctggataggatccttataaagcttcaaagaactggtcatcgggttttgctgtttagtaccatgacaaaacttctagacctcttggaagactacctgaattggcgaagacttgtgtacagaagaattgatgggacaactaatttggatgaccgtgaatcggccataatggactttaatagccctgattccgactgtttcatcttcttgcttagtattcgagctgccgggagaggccttaaccttcagtctgctgacacagttgtcatttatgatcctgacccaaaccctaaaaatgaggagcaggctgtggccagagctcatcgtattggacagaaaagagaagtcagagttatctacatggaagctgttgttgacaaaatctctagccatcagaaggaagatgaattgagaagtggaggcactgttgatatggaggatgaacttgtgggtaaggatcgctatataggatccattgagagcctcataaggaacaatattcaacaatataagatagatatggccgatgaggttatcaatgctggacgtttcgatcaaaggacaacacatgaagagaggcgtttgaccttagagacattgttacatgatgaagaacggtatcaagaaaatgtccatgatgttccttctcttcaggaggtaaatcgcatgattgctaggagtgaagaggaagttgaattgtttgatcaaatggatgaagaactggattggcctgaggacgtgatgcaacatgatgaggttcctgagtggctccgagccaatacaagagaagtgaatgctgctattgctgctttatctaaaagaccatcaaagaacactttattgggtggtagtattggcatggaatccagtgaggtgggttctgaaaggagaaggggacggcccaagggaaaaaagcatcctaattataaagagttggaagatgaaaatggagagtattctgaagcaaattctgaagacagaaatgaagattctgcacaagaaggggaaaatggagagtttgaagatgatgggtatagtggggctgatggaaatcgattggaagaggatggtctaacttctgatgctggatatgaaattgccctttcttcagaaaatgctagaaataatcatgtggttgaagaagctggttcctcaggatcatcctccgacagtcaaagattgacaaagacagtttcaccatcagtttcttccaaaaaatttggctccctctctgcattggatgccaggccaggctccatttcgaaaattatgggagatgagttagaggaaggggaaattgtagtatctggtgattctcacatggatcatcaacagtcaggtagttggattcatgatcgtgatgaaggtgaagatgaacaagttttgcagaaaccaaagattaagcgtaagcgtagtcttcgtgttcgtccccgccatgccatggaaaggcccgaggacaagtctggcagtgagatgatttctcttcaacgtggagaatcatctgttttggcagattataaatatcaaattcaaaaaaggattgatccagaatcaaaatcttttggagactccaatgccagcaagcatgataagaatgaagcatcactaaaaaataagcaaaagttaccttcaaggaaaatagctaattcatccaaattgcatggatcacctaagtctaatcgtttgaattgcacatctgctccttcagaggatggcaatgaacaccccacagaaagttgggaggggaagcatctcaatccaaatggatcttcagctcatgggactaagacaaccgaaatcatccagagaggatgcaaaaatgtaattagcaagctccaaaggagaatagacaaggaaggccatcaaattgtacctttgctaacagatttgtggaagaggatggagaattctgggcatgcaggtggatctgggaacaatctgttggatttacggaagattgaccagcggattgatagaatggattatagcggagtaatggagcttgtgtttgatgtacagttcatgttgaggggtgcaatgcatttctatggatactcatatgaggtaagaactgaaggaaggaaggtccatgatctcttctttgatattttgaaaattgcgtttccggatacagactttggagaagcaagaggtgcactatctttctccagccaagctcctgccggtactgcagcatccccaaggcaagggacagttggccctagcaaaaggcacagaatgaccaatgatgcggaaactgatccatgcccttcacaaaagctgtcacaaagcggatcaacttctaatggcgaaaatgccaggttcaaaggtcatttgccacagaagaactcaagaaccggaagcagcagtgcacgtgaacaacctcagcaggataaccctccactgcttgctcatccaggtcaattggttgtgtgcaagaagaaaagaaatgacagggacaaatcattggggaagggtaggactggatcaactggtcctatttctccacctagtgctataagaagtccagggtcaggttcaaccccaaaggatgctagactggctcaacagggaaggggtagccagccatctcaacactcaaatgggtctggtgggtcagttggttgggcaaaccctgtaaagcgtttgagaacagattctggtaagaggagaccaagccatatgtag

SEQ ID NO: 348 - protein, 2150 aa, Glycine max
MQSFQQQLLRKPEGSEAFLAYQAGLQGVFGSNNFPSSSMQLPQQSRKFVDLAQHGSNQVQGVEQQMLNPVQAAYFQYALQASQQKSALAMQSQQQPKVGMLGPSSVKDQEMRMGNLKMQDLMSMQAVNQVQASSSRNSSEHFTWGEKRVEQGQQLAPDQKSEGNSSSQGPAVGNLMPGNIIRPVQALATQQSIPNTMNNQIAMAAQLRAMQAWAHERNIDLSHPANANLMAQLIPLMQSRIVQQPKANDTNLGAMSSPVPVSNQQVTSPAVASESSAHANSSSDVSAQSGSAKARQTAPPSHLSPPISAGIASSSSDMAAQQFSLHGRDAQGSLKQSVLTINGMPSVHPQQSSANMNLGADHPLNVKTSSSGSEPAKMQYIRQLSQSTSQAGGLTNEGGSGNHPKTQGGPSQMPQQRNGFTKQQLHVLKAQILAFRRLKKAEGALPQELLRAIIPPPLDLQVQQPIHSEGAQNQEKSAGNIVAEHPRQNEVNAKDSQPISSINGKNSSKQEVFVRDENSTVTAVQVQGTPRVTKESAGKEEQQSVACSAKSDQESEHGIGRTPVRNELVLDKGKAVAAPQASVNDAMQLNKPAQASAVSQTKDVGSTRKYHGPLFDFPFFTRKHDSFGSSMMINNNNLSLAYDVKELLFEEGIEVLGKRRTESLKKIEGLLAVNLERKRIRPDLVLRLQIEEKKLRLLDLQARLRDEIDQQQQEIMAMPDRPYRKFVRLCERQRMELARQVQASQRALREKQLKSIFQWRKKLLETHWAIRDARTARNRGVAKYHERMLREFSKRKDDDRNKRMEALKNNDVDRYREMLLEQQTSIQGDAAERYAVLSTFLTQTEEYLHKLGSKITAAKNQQEGLSEEEVRAAAACAGEEVMIRNRFMEMNAPKDNSSVSKYYSLAHAVSEKVVCQPSMLRAGTLRDYQLVGLQWMLSLYNNKLNGILADEMGLGKTVQVMALIAYLMEFKGNYGPHLIIVPNAVMVNWKSELYTWLPSVSCIFYAGGKDYRSKLYSQEIMAMKFNVLVTTYEFIMYDRARLSKIDWKYIIIDEAQRMKDRDSVLARDLDRYRCQRRLLLTGTPLQNDLKELWSLLNLLLPEVFDNKKAFNDWFSKPFQKEGPTQNTEDDWLETEKKVIIIHRLHQILEPFMLRRRVEDVEGSLPPKVSIVLRCKMSAVQSAIYDWVKSTGTLRLDPEGENSKIQKNPHYQAKEYKTLNNRCMELRKTCNHPSLNYPLLGELSTNSIVKSCGKLWILDRILIKLQRTGHRVLLFSTMTKLLDLLEDYLNWRRLVYRRIDGTTNLDDRESAIMDFNSPDSDCFIFLLSIRAAGRGLNLQSADTVVIYDPDPNPKNEEQAVARAHRIGQKREVRVIYMEAVVDKISSHQKEDELRSGGTVDMEDELVGKDRYIGSIESLIRNNIQQYKIDMADEVINAGRFDQRTTHEERRLTLETLLHDEERYQENVHDVPSLQEVNRMIARSEEEVELFDQMDEELDWPEDVMQHDEVPEWLRANTREVNAAIAALSKRPSKNTLLGGSIGMESSEVGSERRRGRPKGKKHPNYKELEDENGEYSEANSEDRNEDSAQEGENGEFEDDGYSGADGNRLEEDGLTSDAGYEIALSSENARNNHVVEEAGSSGSSSDSQRLTKTVSPSVSSKKFGSLSALDARPGSISKIMGDELEEGEIVVSGDSHMDHQQSGSWIHDRDEGEDEQVLQKPKIKRKRSLRVRPRHAMERPEDKSGSEMISLQRGESSVLADYKYQIQKRIDPESKSFGDSNASKHDKNEASLKNKQKLPSRKIANSSKLHGSPKSNRLNCTSAPSEDGNEHPTESWEGKHLNPNGSSAHGTKTTEIIQRGCKNVISKLQRRIDKEGHQIVPLLTDLWKRMENSGHAGGSGNNLLDLRKIDQRIDRMDYSGVMELVFDVQFMLRGAMHFYGYSYEVRTEGRKVHDLFFDILKIAFPDTDFGEARGALSFSSQAPAGTAASPRQGTVGPSKRHRMTNDAETDPCPSQKLSQSGSTSNGENARFKGHLPQKNSRTGSSSAREQPQQDNPPLLAHPGQLVVCKKKRNDRDKSLGKGRTGSTGPISPPSAIRSPGSGSTPKDARLAQQGRGSQPSQHSNGSGGSVGWANPVKRLRTDSGKRRPSHM

SEQ ID NO: 349 - DNA, 6675 bp, Medicago truncatula
atgcaatctaacggcggcgccggcgatgggcctggccggaactcggcggggcgggcagcgtcgacgtcgtcagcggctgcgtcgccgacttcttcgtcttcggcggcttcccacatgggattggactcattgcagcagcaacagcagatgataggtggttctagacagtcatttcaacagcaactgcttagaaaatctgaagggagtgaagcggtgctggcgtatcaagcagggcatcaaggattatttgggaataacaattactcatcttccactgccatgcaattgcctccgcagtctcgaaatttttttgctttagctcagcatggacctaaccagggtcaaggcattgagcagcagaggctaaatcctgtccgacaggcgtactctcagtatgctctccagagttttcaacaaagacctgctttggcaatgcagtctcagcagcaacctaaaatggagatgttaggccccacatctgttaaggatcaagaaatgcgaatgggaaattttaagttgcaggaccttatgtctatgcaggcagtgaatcatggccaaggatcgtcatcttctaggaattcatctgaacatttttcacatggtgaaaagcgggtagagcaaggacagcagctagcttctgataagaagaatgaaggaaagtcctcaactcagggactaggcattggacacttgatgcccgggaataatataaggcctgtgcaagcactgccgactcaacagagcatcccaattgctatgaacaatcagattgcaacctctgatcaactccgagctatgcaggcatgggcacatgaacggaatattgatctatcacaacctgcaaatgctaactttgcggctcagctcaacttgatgcaaacaaggatggttcaacaatcaaaggaaagtggtgctcagtcatcttctgtcccagtttcaaagcagcaggctacttctccggcagtttcaagtgagggctctgctcatgctaattcatctactgatgtttctgcactggtaggttctgtgaaagccaggcagacagctccacccagccatttgggcttacccatcaatgctggtgtggctggaaactccagtgacacggcagtgcagcaattcagtcttcatggtagagatgctcaaggatctttgaagcaattgattgtaggtgtaaatggaatgccttctatgcatccacaacagtcttctgcaaacaagagcttaggcgcagatagttctttgaatgcaaaagcttcatcatctagatctgatccagaacctgcaaaaatgcagtatgtcaggcaattaagccaacatgcttccctggatggagggtcgacaaaggaagtgggctctggaaattacgccaaacctcaagggggaccatctcagatgcctcaaaaactaaatggctttaccaaaaatcagcttcatgttcttaaagcacaaatactagcatttaggcggctgaagaaaggtgatggtatacttccccaagaacttcttgaggccattagtccaccacctcttgatttgcatgtgcagcagccaattcactctgcaggagcacagaatcaagataaatctatgggaaatagtgtgacagaacaaccaaggcagaacgaacccaaggccaaggattcacaacccatcgtatcttttgatggaaattcttcagagcaggaaacttttgtaagagatcaaaagtcaactggagcagaagttcatatgcaagctatgcttcctgtgacaaaggtctctgctggaaaggaagaccagcaatccgctggattctctgctaagtcagacaagaaaagtgaacatgtgattaacagagctcctgttataaatgatttggcattagataagggaaaggctgtcgcttcccaggctttggtaactgacactgcacagattaataaacctgcacagtcaagcactgttgttggcctgccaaaggatgcaggacccgcaaaaaaatattatgggcccctatttgattttcctttcttcactaggaaacaagattcctttggatcatcaatgatggcaaacaacaacaacaatttgtctctggcatatgatgtaaaagagcttctttatgaggaaggcacagaagtctttaacaagagaagaactgagaatttaaagaagattgaaggattacttgcggtaaacttagagaggaaaagaattaggccagatcttgtgttgaagttgcaaattgaagagaaaaagcttcgccttttagatctccaggcacgtttaagaggtgagattgatcaacagcaacaggagataatggcaatgccagacaggccatatcgcaagtttgttaagctgtgtgaacgtcagcgtgtggaactcgctagacaagtgcagacatctcagaaagctttaagggagaagcaactgaaatctatattccaatggcgcaagaagcttcttgaagttcactgggccattcgtgatgctcgtactgctcgcaatagaggggtggccaaatatcacgagaagatgttgaaagaattctcaaaaaataaggatgatgacaggaataagagaatggaagccttaaaaaacaatgatgttgacagatatagggagatgttgctggagcaacagactagccttccaggggatgctgcggagagatacaatgtactttcaactttcttaacccagactgaagagtatctacaaaaattaggaagtaagataacttctgccaaaaatcaacaggaagtagaggagtcggcaaaagccgcagcagctgctgcacgattgcagggtctttctgaagaagaagtcagagctgcagcagcttgtgctggagaggaagtgatgattagaaatcgttttatggagatgaatgctccaaaagatggctcgtcttctgtcagcaagtattacaaccttgctcatgccgtgaatgaaaaagttttaaggcaaccatcgatgttgcgggctggaacactgagagagtatcagctcgttggattgcaatggatgctttctttgtataacaacaaattaaatggaattttggctgatgagatgggtcttggcaaaacagtccaggttatggcgttaattgcctacttaatggaatttaaaggaaactatggcccacatcttataatagttccaaatgctgttttggttaactggaagagtgaattgcatacatggttaccatcggtgtcatgcattttttatgttggatcgaaggatcatcggtcaaaattattttctcaagaggttatggctatgaaatttaatgtccttgtgactacttatgagttcatcatgtatgaccgttcaaagctttctaaaattgattggaggtatgtcataattgatgaagctcagagaatgaaggatagagagtcagttttagctcgtgatcttgatagatatcggtgtcacagacgcctgcttctgacaggaacacctttacagaatgatttgaaggagctttggtcacttttaaatctacttcttcctgaggtttttgacaataagaaagccttcaatgattggttctcgaaaccatttcaaaaggaagatcccaaccaaaatgcagagaatgattggcttgaaacagagaagaaagttatcattatccatcggcttcatcagattcttgagcctttcatgctcaggcgtcgtgttgaagaggttgaaggctcgctaccaccaaaggtatctatagttttacggtgtagaatgtcagccttccagagtgccatttatgactggattaaatccactggaactcttcgtcttaatcctgaggaggagcaaagtcggatggaaaaaagtccactctaccaggcaaagcagtataaaactttaaataacagatgcatggagctgcgtaaaacttgcaaccatccattgcttaattacccattctttagtgatttatctaaagattttatggtaaaatgttgtgggaaattgtggatgctggatagaattctcataaaacttcaaagaacaggacatcgagttcttctgtttagtaccatgacaaaactcctagacatattggaagagtacctgcaatggcgaagacttgtttacagaagaattgatgggacaacagctttggaagaccgcgaatcagctatagtggacttcaatagccctaattcagactgtttcatcttccttcttagtattcgggctgctgggagaggccttaaccttcagtcagctgacacagttgttatttatgaccccgacccaaaccctaaaaatgaggagcaggctgtggccagagctcatcgcattggacaaaaaagagaagtcaaagtcatctacatggaagctgttgttgacaaaatctctagtcatcagaaggaggatgaaatgagaattggaggcactattgatatggaggatgagcttgcaggtaaggatcgatatataggatccattgagagcctcataaggagcaatattcagcaatataagatagatatggctgatgaggttattaatgctggacgttttgatcaaaggacaacacatgaagagagacgtttgactttggagacattattgcatgatgaagaaaggtgccaagaaactgtccacgatgttccttcgttgcaggaggtaaatcgcatgattgctaggaatgaagaggaagttgaattgtttgatcaaatggatgaagaagaggattggcttgaggagatgactcggtatgatcaggtacctgattggattcgagccagtacaagagaagtgaatgctgctattgctgcttcatcaaaaagaccatcaaagaagaatgctttatcgggtggtaatgttgtcttggactccactgaaattggttctgaaaggagaaggggacgaccaaagggaaaaaagaatccaagttataaagagttggaagattcctctgaagaaatatctgaagacagaaatgaagattctgcacatgatgaaggggagataggagagtttgaagatgatgggtatagtggggctggtatagcgcaacccgtagataaagataagttggatgatgttactccttctgatgctgaatatgaatgtcccaggtcttcttcagaaagtgctagaaataataatgtggttgaaggtggttcctcagcatcatccgcaggcgttcaaagattgacacaagcagtgtcgccatcagtttcttctcagaaatttgcttccctgtctgcgctggatgccaagccaagttcgatctcaaaaaagatgggagatgagttagaggaaggggaaattgcagtatctggtgaatctcacatgtatcatcaacagtcgggaagttggattcatgatcgtgatgaaggtgaggaagaacaagttttgcagaaacccaagattaaacgtaaacgtagtcttcgtgttcggcctcgtcacaccatggaaaagcctgaggataagtctggcagtgagatggcatctcttcaacgtggacaatcatttcttttaccagacaaaaaatatccattgcaatcaaggatcaaccaagaatcaaaaacatttggagattccagttccaacaagcatgacaagaatgaaccaatattaaaaaataagcgaaatttacctgcaaggaaagtagctaatgcatccaaattacatgtctcaccgaagtccagtcgtttgaattgcacatccgctccttcagaagacaatgatgagcactctagagaaagattgaaggggaagcctaacaatttacgtggatcttcagctcatgtcactaatatgactgaaattatccagagacggtgcaaaagtgtaattagcaagctccaaaggagaatagacaaggaaggccatcaaattgtacctttgctgacagatttatggaagaggattgagaattctgggttcgctggtggttctgggaacaatctcttggatttaagaaagattgaccagcgaatcaatagattggagtacagtggagtaatggagtttgtttttgatgtgcaattcatgttgaagagtgcaatgcagttctatgggtactcgtacgaggtaagaactgaagcaaggaaagttcatgatctcttctttgacatcttgaaaaccacattttccgacattgacttcggagaagcgaaaagtgcactttcctttactagtcaaatttctgccaatgctggagcatcctcaaagcaagcgactgtttttccaagtaagaggaagagagggaaaaatgatatggagactgatccaacccctacacaaaagccactgcaacgtggatccacttccaacagcgaaagtggcaggatcaaagtccaattgcctcagaaggcatcaagaactggaagtggtagcggcagtgccagggagcaacttcaacaggatagtccttcactgcttactcacccaggtgacctagttgtatgcaagaagaaaaggaatgagaggggggataaatcatcggtgaagcataggatcggttcagctggtcctgtttcaccacctaagattgttgttcatactgtacttgctgagagaagtccaactccagggtcaggttctacccctagggctggccatgcacatacatcaaatgggtctggcgggtcagttggatgggcgaaccccgtgaagcggatgagaacagattcagggaaaaggagaccaagccatatgtag

SEQ ID NO: 350 - protein, 2224 aa, Medicago truncatula
MQSNGGAGDGPGRNSAGRAASTSSAAASPTSSSSAASHMGLDSLQQQQQMIGGSRQSFQQQLLRKSEGSEAVLAYQAGHQGLFGNNNYSSSTAMQLPPQSRNFFALAQHGPNQGQGIEQQRLNPVRQAYSQYALQSFQQRPALAMQSQQQPKMEMLGPTSVKDQEMRMGNFKLQDLMSMQAVNHGQGSSSSRNSSEHFSHGEKRVEQGQQLASDKKNEGKSSTQGLGIGHLMPGNNIRPVQALPTQQSIPIAMNNQIATSDQLRAMQAWAHERNIDLSQPANANFAAQLNLMQTRMVQQSKESGAQSSSVPVSKQQATSPAVSSEGSAHANSSTDVSALVGSVKARQTAPPSHLGLPINAGVAGNSSDTAVQQFSLHGRDAQGSLKQLIVGVNGMPSMHPQQSSANKSLGADSSLNAKASSSRSDPEPAKMQYVRQLSQHASLDGGSTKEVGSGNYAKPQGGPSQMPQKLNGFTKNQLHVLKAQILAFRRLKKGDGILPQELLEAISPPPLDLHVQQPIHSAGAQNQDKSMGNSVTEQPRQNEPKAKDSQPIVSFDGNSSEQETFVRDQKSTGAEVHMQAMLPVTKVSAGKEDQQSAGFSAKSDKKSEHVINRAPVINDLALDKGKAVASQALVTDTAQINKPAQSSTVVGLPKDAGPAKKYYGPLFDFPFFTRKQDSFGSSMMANNNNNLSLAYDVKELLYEEGTEVFNKRRTENLKKIEGLLAVNLERKRIRPDLVLKLQIEEKKLRLLDLQARLRGEIDQQQQEIMAMPDRPYRKFVKLCERQRVELARQVQTSQKALREKQLKSIFQWRKKLLEVHWAIRDARTARNRGVAKYHEKMLKEFSKNKDDDRNKRMEALKNNDVDRYREMLLEQQTSLPGDAAERYNVLSTFLTQTEEYLQKLGSKITSAKNQQEVEESAKAAAAAARLQGLSEEEVRAAAACAGEEVMIRNRFMEMNAPKDGSSSVSKYYNLAHAVNEKVLRQPSMLRAGTLREYQLVGLQWMLSLYNNKLNGILADEMGLGKTVQVMALIAYLMEFKGNYGPHLIIVPNAVLVNWKSELHTWLPSVSCIFYVGSKDHRSKLFSQEVMAMKFNVLVTTYEFIMYDRSKLSKIDWRYVIIDEAQRMKDRESVLARDLDRYRCHRRLLLTGTPLQNDLKELWSLLNLLLPEVFDNKKAFNDWFSKPFQKEDPNQNAENDWLETEKKVIIIHRLHQILEPFMLRRRVEEVEGSLPPKVSIVLRCRMSAFQSAIYDWIKSTGTLRLNPEEEQSRMEKSPLYQAKQYKTLNNRCMELRKTCNHPLLNYPFFSDLSKDFMVKCCGKLWMLDRILIKLQRTGHRVLLFSTMTKLLDILEEYLQWRRLVYRRIDGTTALEDRESAIVDFNSPNSDCFIFLLSIRAAGRGLNLQSADTVVIYDPDPNPKNEEQAVARAHRIGQKREVKVIYMEAVVDKISSHQKEDEMRIGGTIDMEDELAGKDRYIGSIESLIRSNIQQYKIDMADEVINAGRFDQRTTHEERRLTLETLLHDEERCQETVHDVPSLQEVNRMIARNEEEVELFDQMDEEEDWLEEMTRYDQVPDWIRASTREVNAAIAASSKRPSKKNALSGGNVVLDSTEIGSERRRGRPKGKKNPSYKELEDSSEEISEDRNEDSAHDEGEIGEFEDDGYSGAGIAQPVDKDKLDDVTPSDAEYECPRSSSESARNNNVVEGGSSASSAGVQRLTQAVSPSVSSQKFASLSALDAKPSSISKKMGDELEEGEIAVSGESHMYHQQSGSWIHDRDEGEEEQVLQKPKIKRKRSLRVRPRHTMEKPEDKSGSEMASLQRGQSFLLPDKKYPLQSRINQESKTFGDSSSNKHDKNEPILKNKRNLPARKVANASKLHVSPKSSRLNCTSAPSEDNDEHSRERLKGKPNNLRGSSAHVTNMTEIIQRRCKSVISKLQRRIDKEGHQIVPLLTDLWKRIENSGFAGGSGNNLLDLRKIDQRINRLEYSGVMEFVFDVQFMLKSAMQFYGYSYEVRTEARKVHDLFFDILKTTFSDIDFGEAKSALSFTSQISANAGASSKQATVFPSKRKRGKNDMETDPTPTQKPLQRGSTSNSESGRIKVQLPQKASRTGSGSGSAREQLQQDSPSLLTHPGDLVVCKKKRNERGDKSSVKHRIGSAGPVSPPKIVVHTVLAERSPTPGSGSTPRAGHAHTSNGSGGSVGWANPVKRMRTDSGKRRPSHM

SEQ ID NO: 351 - DNA, 6519 bp, Populus trichocarpa
atgcaggcattacagcaacaattacttagaaaacccgaagggaatgaaacccttctagcttatcaagctggaactcttcaaggagttacgggagggaacaattttgcttcatctccaggctcaatgcaaatacctcaacagtccaggcaattatttgatttggctcgacaacatggttcctctcaggacggacagaataggaatcaaggtgttgagcaacaggctttgaacccaattcaacaagcatatcttcaatatgctttccaggccgcccaacaaaagtcagctttggcaatgcagtctcagcaacaagctaaagtaggaacactgggctctcctgctggaaaggatcatgacatgcgggtgggaaatttgaaaatgcaggaactcatgtccatgcagtcggcaaatcaggctcaggcttcatcttctaagaacccatctgaacatttttctcgtggtgaaaaacaggtggaacaaggtcagcagcaagcctctgaacagaggaatgagcaaaagtctccaatccagcctactgccattggacaactaatgcctgcaaatgttactagacccatgcaggcaccacaggttcagcaaaacatccaaaacatggcaaacaaccagctcacaatggctgctcagatgcaagcaatgcaagcatgggcacttgagcgcaacattgatctggcacaacctgcaaatgccaacttgatggcgaagcttattccagtcatgcaggcaaggatggctgcacaactaaaggcaaatgaaaataatactagtggacaatcatcacatctccctgtgtcaaagccacaggttgcttctccatccattgcaaacgagagttctcctcatgcaaattcatccagtgatatctctgggcagtctggctctgtaaaaaccaggcaaactgttccatctggtccctttggctcaacttccagtggaggcatagtgaataaccctaacaacctcacaatgcagcagcaggcttttcacagcagagagaaccaagcacctcctcgacaggcagttgtgcttggaaatggaatgcctgcaaacgcaagccaaggtgcagatcatactctgccttcaaaaaatgcattaaacagctcagaaacttcacagacacagcaattcaggcagctgaatcgatcttctccacaatctgctggtccttctaatgacggaggcttgggcaaccacttctcttcacaaggcaggccagctgtccagatggcacaacagcgcactgggttcactaaacagcagttgcatgttctgaaggctcaaattctagcatttaggcgactgaagaaaggagaaggtactcttccacaagagcttcttcgagctattgctccaccaccccttgagttgcagctgcagcaacaacttctccctgcaggaggaagtaatctggacaggtcgggtggaaagattgctgaagaccaagcaaggcatctggagtccaatgataagggttcgaaagcaatgctatctatgaacggacagaatttttctaaagaggaagtttttactggtgatgagaaagcaaccgtctcaaccatgcatatgcaaaaggcaccggctgtgatgaaggaacccactccccttgtggcttctgggaaagaagagcagcaaactgctacatgttctgtcaattcagaccaggagactgaacatggacttctgaaaactcctgttagaagtgatctagcagcagataggggaaggggcgttgcttcacagtttcctgcatctgatgctatgcaagctaagaaacctgcacaagcaagcactgtggtccagccgaaagataccggctctgccagaaagtatcatggaccattatttgattttcccttttttactaggaaacatgactctgttgggtcaactgggatgattaacacgaataataacctaacattgacctatgatgtcaaagatcttctttttgaggaaggcatggaaatgcttaacaagaaaaggtcagagaatttgaagaaaatcaatggtctactagcagtaaatttagagaggaaaaggattagaccagatcttgtgttgcggttacagattgaagagagaaagcttaggcttttggatctacaggcgcgtttaagggatgacgttgatcaacagcaacaggaaatcatggcaatgcctgacagactatataggaagtttgttcggctatgtgagcgtcaacggatggagctgacaaggcaggtacaggcctctcaaaaagccataagagagaagcaattgaaatccatcatgcagtggcgcaagaaacttcttgagactcattgggccatccgggatgcacgtactgcccgtaacagaggagttgctaaataccatgagagaatgttgagggagttttcaaagagaagggatgatgaccgaaataaaaggatggaggcattgaagaacaacgatgttgaaaggtatagagaaatgttgttggagcaacagactagcatctcaggcgatgcttctgagagatatgccgttctctcgtcattcttgactcagacagaagaatatctccataagctgggagaagaagaagtacgagcagctgcagcttgtgctggtgaggaagtattgataagaaaccggtttgtggaaatgaatgcaccctgggacagttcatctgttaacaaatattacaatcttgcacatgctgtgaatgaaagggtcataaggcaaccatctatgttacgagttggaaccttacgagactatcagcttgttgggttgcagtggatgctttctttgtataacaacaaattaaatggaatcttggcagatgagatggggcttggaaagactgtacaggtgatggcattgattgcttatctaatggaattcaaaggaaactatggaccacatcttataatcgttcctaatgctgttttggtgaattggaagagcgagctacacaactggctgccatctgtgtcctgcatttattatgttggtggaaaggatcagcggtcaaaattattttcccaagaggtttctgccatgaaatttaatgtccttgtgacaacttatgagttcatcatgtatgaccggtcaaaactttctaaagttgattggaagtacatcataattgacgaggcacagagaatgaaggacagggagtcagttttagcccgtgatcttgatagatatcgctgccagaggcgcttacttctcacagggacaccactacagaatgacttgaaggagctatggtcgctcttgaatctacttctgccagaagtttttgataatcgtaaagcatttcatgattggttctcaaagcccttccaaaaggaagctccaatgcatgatggagaggatgactggcttgaaactgaaaagaaggtgatcataattcatcgacttcatcaaattctagagccttttatgctcagacgtcgtgttcaagacgtggaaggttcacttccacccaagagtacaatttatgattggatcaaatctactggcactattcgagttgaccctgaggatgagaagctcagggctcaaaaaaatccagcataccagcctaaggtgtacaaaactttaaataacagatgtatggagctccgaaaaacttgcaatcatcctttgcttaattacccatatttcaatgacttatccaaggatttccttgttcaatcttgtgggaaactatggattctggataggattctcataaaacttcaaagaacaggccatcgggtactactctttagtaccatgacaaaactccttgatatattggaggaatacttgcaatggcgccgactggtatacagaaggattgatggaacaactagccttgaagatcgtgaatcggctatcgtggactttaatagccatgattcagactgctttattttcttgcttagtattcgtgctgctggaaggggtcttaatcttcagtcagctgacacagttatcatatatgatcctgatccaaaccctaagaacgaggaacaggcagttgctagagcccaccggattggacagacaagagaagtcaaagtcatttatatggaagcagttgttgacaaaatttctagctgtcaaaaagaggatgaattaagaagtggaggcaccgttgatttagaagatgaccttgttggtaaggatcgatatatgggttctattgagagcctaataaggaaaaacatccagcaatataagattgacatggctgatgaggttatcaatgctgggcgttttgatcaaagaacaacacatgaggagaggcgaatgactttagagacattattgcatgatgaggagcggtatcaagaaactatgcatgatgttccatcactccaagaggttaatcgcatgatagccaggagtaaagatgaagttgaattatttgatcaaatggatgaagagtttgattggacggaggagatgacgaggtatgatcaggtacctaaatggcttcgagccagttcaaaagaagtggatggtactattgctattctatcaaagaaaccatcaaaagctatcctttttgctgatgttatgggtatggtttccggtgaaatggaaactgaaagaaaacgggtgcggccaaaggggaaaaagtctcctaattacaaggaaatcgatgatgaaaatggagactattctgaggcaagttctgacgagagaaacggttattctgcacatgaagaagagggagaaattcaagaaattgaagatgatgaatccagtgatgctgttggggcaccgcccattaataaggaccaatcagaagatgatggtcccccgtgtgatggtgggtatgagtgtcacggagctttggaaagcactagaaataatgatgtactagatgaagctggttcctcaggatcatcctctgacagccaaagagttacacgaatgatctctcctgtctctcctcagaaattcgggtcactttctgcattagatgctagaccaggttcacttcccaaaaagctgccagatgaattagaagagggggaaattgccgtgtctggagattctcacgtggatcaccagcaatctggaagttggatgcatgatcgcgatgaaggtgaagatgaacaggttctgcaacctaagattaaacgaaaacgtagtattcggcttcgaccccgtcacactgttgaaaggccagaggagaagtctagcaatgatgtgcaacgtggagattcttgtttgttgccattccaaatggatcataaatatcaagcacagttgaggagcgatactgaaatgaaagcattagtagagcctagtggattcaagcatgatcagattgattcctcaacaagtaggcgaaatttaccttcaagaagaatagccaaaacacctaagttacatgcttcgccaaaatctggcagattgcatttgcagtctgctccagcagaggatgctactgaacactccagagtgagtctggatggtaaagttccaagtacaagtggtacttcatctttgggcaccaagatgtctgatgtcatccagagaaggtgtaagaatgttattggcaagttccaaaggaggatagacaaggaaggacaacaaattgtacctcttctagctgatttgtggaagaggattgaaaattctggtcacgtaagtggtgctggaactaatcttttggatttacggaagattgaacagcgtgttgacagattggagtatagtggagtgatggagcttgtgtttgacgtgcaattcatgttaaagggtgcaatgcaattttatgggttctcacatgaggttagaactgaagcaagaaaggtgcatgatctcttttttgatatcttgaagattgcatttccagacaccgatttccgagaggccaggaacgctctatctttctctggcccatcatcaacttccgtttctgctccgtctgcaaaacaagctgctcttggcctaagcaagagaaacaagtcaataaataatgtggaacctgacaacagcactacccataagccaatgcagcgaggatccattcctaatagtgaagacattaggagcgtccgtgtgccccagaaggaaacaagggttgggagtggaagtggcagtagtagggaacaatatcatcaggatgattctccactgcatccaggggagttagttatctgcaagaagaagaggaaagaccgggacaagtcagcagtgaggtcaaggactggatcaagtggtccagtctccccccctagcatgggccgtaatatcacgagtcctgttttgaattcaatacctaaagatgcgagactgaacactagtcctgttttgaattcaatacctaaagatgcgagactgaatactagtcctgttttgaattcaatacctaaagatgcgagactgagccagcagaatacgcatcagcaagggtgggtgaaccaaccacaaccaccaaatggtggtgcggggagtgttggttgggcaaatcctgtaaagaggttgaggacagatgctggtaaaagaaggccgagccatttatga

SEQ ID NO: 352 - protein, 2172 aa, Populus trichocarpa
MQALQQQLLRKPEGNETLLAYQAGTLQGVTGGNNFASSPGSMQIPQQSRQLFDLARQHGSSQDGQNRNQGVEQQALNPIQQAYLQYAFQAAQQKSALAMQSQQQAKVGTLGSPAGKDHDMRVGNLKMQELMSMQSANQAQASSSKNPSEHFSRGEKQVEQGQQQASEQRNEQKSPIQPTAIGQLMPANVTRPMQAPQVQQNIQNMANNQLTMAAQMQAMQAWALERNIDLAQPANANLMAKLIPVMQARMAAQLKANENNTSGQSSHLPVSKPQVASPSIANESSPHANSSSDISGQSGSVKTRQTVPSGPFGSTSSGGIVNNPNNLTMQQQAFHSRENQAPPRQAVVLGNGMPANASQGADHTLPSKNALNSSETSQTQQFRQLNRSSPQSAGPSNDGGLGNHFSSQGRPAVQMAQQRTGFTKQQLHVLKAQILAFRRLKKGEGTLPQELLRAIAPPPLELQLQQQLLPAGGSNLDRSGGKIAEDQARHLESNDKGSKAMLSMNGQNFSKEEVFTGDEKATVSTMHMQKAPAVMKEPTPLVASGKEEQQTATCSVNSDQETEHGLLKTPVRSDLAADRGRGVASQFPASDAMQAKKPAQASTVVQPKDTGSARKYHGPLFDFPFFTRKHDSVGSTGMINTNNNLTLTYDVKDLLFEEGMEMLNKKRSENLKKINGLLAVNLERKRIRPDLVLRLQIEERKLRLLDLQARLRDDVDQQQQEIMAMPDRLYRKFVRLCERQRMELTRQVQASQKAIREKQLKSIMQWRKKLLETHWAIRDARTARNRGVAKYHERMLREFSKRRDDDRNKRMEALKNNDVERYREMLLEQQTSISGDASERYAVLSSFLTQTEEYLHKLGEEEVRAAAACAGEEVLIRNRFVEMNAPWDSSSVNKYYNLAHAVNERVIRQPSMLRVGTLRDYQLVGLQWMLSLYNNKLNGILADEMGLGKTVQVMALIAYLMEFKGNYGPHLIIVPNAVLVNWKSELHNWLPSVSCIYYVGGKDQRSKLFSQEVSAMKFNVLVTTYEFIMYDRSKLSKVDWKYIIIDEAQRMKDRESVLARDLDRYRCQRRLLLTGTPLQNDLKELWSLLNLLLPEVFDNRKAFHDWFSKPFQKEAPMHDGEDDWLETEKKVIIIHRLHQILEPFMLRRRVQDVEGSLPPKSTIYDWIKSTGTIRVDPEDEKLRAQKNPAYQPKVYKTLNNRCMELRKTCNHPLLNYPYFNDLSKDFLVQSCGKLWILDRILIKLQRTGHRVLLFSTMTKLLDILEEYLQWRRLVYRRIDGTTSLEDRESAIVDFNSHDSDCFIFLLSIRAAGRGLNLQSADTVIIYDPDPNPKNEEQAVARAHRIGQTREVKVIYMEAVVDKISSCQKEDELRSGGTVDLEDDLVGKDRYMGSIESLIRKNIQQYKIDMADEVINAGRFDQRTTHEERRMTLETLLHDEERYQETMHDVPSLQEVNRMIARSKDEVELFDQMDEEFDWTEEMTRYDQVPKWLRASSKEVDGTIAILSKKPSKAILFADVMGMVSGEMETERKRVRPKGKKSPNYKEIDDENGDYSEASSDERNGYSAHEEEGEIQEIEDDESSDAVGAPPINKDQSEDDGPPCDGGYECHGALESTRNNDVLDEAGSSGSSSDSQRVTRMISPVSPQKFGSLSALDARPGSLPKKLPDELEEGEIAVSGDSHVDHQQSGSWMHDRDEGEDEQVLQPKIKRKRSIRLRPRHTVERPEEKSSNDVQRGDSCLLPFQMDHKYQAQLRSDTEMKALVEPSGFKHDQIDSSTSRRNLPSRRIAKTPKLHASPKSGRLHLQSAPAEDATEHSRVSLDGKVPSTSGTSSLGTKMSDVIQRRCKNVIGKFQRRIDKEGQQIVPLLADLWKRIENSGHVSGAGTNLLDLRKIEQRVDRLEYSGVMELVFDVQFMLKGAMQFYGFSHEVRTEARKVHDLFFDILKIAFPDTDFREARNALSFSGPSSTSVSAPSAKQAALGLSKRNKSINNVEPDNSTTHKPMQRGSIPNSEDIRSVRVPQKETRVGSGSGSSREQYHQDDSPLHPGELVICKKKRKDRDKSAVRSRTGSSGPVSPPSMGRNITSPVLNSIPKDARLNTSPVLNSIPKDARLNTSPVLNSIPKDARLSQQNTHQQGWVNQPQPPNGGAGSVGWANPVKRLRTDAGKRRPSHL

SEQ ID NO: 353 - DNA, 1593 bp, Brassica napus
atgtctctgagacccaacgccaggaccgaggttcgccgtaaccgctacaaagtggcggtggacgcagaggaaggacgcaggaggagggaagacaacatggtggagatccgtaagaccaagcgcgaagagagcttactgaagaagcgtcgcgaggggcttcaagccacgcagctgcctcaagtcacttctgctgcttcatccgtcgagaaaaagttggagagcttgccttctatggtcggtggagtctggtcagatgataggagcttgcagcttgaagccactactcagttccgtaaattgctttctatagagcgtagtcctccgatagaagaggtgattgatgctggtgttgtgccaaggtttgtggagtttctcatgagggaggattatccacagcttcagtttgaagctgcttgggcactgacgaacattgcttctgggacttctgagcatacgaaggttgtcattcaacatgatgctgttcccatttttgttcagctcctggcttcccagagtgatgatgtccgtgagcaggctgtttgggcattagggaacgttgctggtgattctccacagtgcagagatcttgtactgagtaagggagctttgttaccattgctctctcagttgaatgagcatgctaaactctccatgctcagaaatgctacttggaccctctctaatttctgcaggggcaagccacagcctccttttgaccaggttcgtccagcacttccagcccttgagcgccttattcattcgactgatgaggaagtgttaacggatgcctgttgggctctctcttatctttctgatggcacaaatgacaaaatccaatctgtcatcgaggcaggtgttgttcctcgacttgtcgagcttctccagcatccgtcaccgtctgtgcttatacccgctcttcgtagtattggtaacatcgtcactggagacgatgcgcagacgcagtgtgtaattagtcatggtgcactcctttgtcttctgagtcttctgactcagaatcataagaagagcattaaaaaggaagcatgctggacaatctcaaacatcactgctggaaacagggaccagattcaggctgtatgtgaagctggtttgatcggtcctctcatcaatctgcttcaaaatgctgagttcgatataaagaaagaagctgcatgggcagtctcaaatgccacttcgggcggttctgctgaccagatcaagtacatggtggatcagggagtcgtgaaaccactgtgcgatcttttggtatgcccggatccaaggattatcaccgtgtgtctagaaggactagagaacattctgaaagtcggggaagctgagaaggtgacgggaaacacaggggatgcaaactattatgcacagctaatcgatgatgctgagggactagagaagattgagaatctgcagagtcatgacaacagcgagatatatgagaaggcagtgaagattcttgaaacatactggttggaggaggaagacgagactttaccacctggtgatgaatctgctcagggattccagtttgggggtagcgatgcagccgcacctccaggtggattcaacttcaagtga

SEQ ID NO: 354 - protein, 530 aa, Brassica napus
MSLRPNARTEVRRNRYKVAVDAEEGRRRREDNMVEIRKTKREESLLKKRREGLQATQLPQVTSAASSVEKKLESLPSMVGGVWSDDRSLQLEATTQFRKLLSIERSPPIEEVIDAGVVPRFVEFLMREDYPQLQFEAAWALTNIASGTSEHTKVVIQHDAVPIFVQLLASQSDDVREQAVWALGNVAGDSPQCRDLVLSKGALLPLLSQLNEHAKLSMLRNATWTLSNFCRGKPQPPFDQVRPALPALERLIHSTDEEVLTDACWALSYLSDGTNDKIQSVIEAGVVPRLVELLQHPSPSVLIPALRSIGNIVTGDDAQTQCVISHGALLCLLSLLTQNHKKSIKKEACWTISNITAGNRDQIQAVCEAGLIGPLINLLQNAEFDIKKEAAWAVSNATSGGSADQIKYMVDQGVVKPLCDLLVCPDPRIITVCLEGLENILKVGEAEKVTGNTGDANYYAQLIDDAEGLEKIENLQSHDNSEIYEKAVKILETYWLEEEDETLPPGDESAQGFQFGGSDAAAPPGGFNFK

SEQ ID NO: 355 - DNA, 957 bp, Gossypium hirsutum
  misc_feature (653)..(653): n is a, c, g, or t
  misc_feature (737)..(737): n is a, c, g, or t
atgtctcttagaccgagcgcgaggaccgaggttcgacggaaccgatacaaggtggcggttgatgcggaggaaggtcggcggaggagagaagacaacatggtggagatccggaagaacaagagagaagagaaccttctaaaaaagcgtcgcgaaggacttcttgctcaacaaccgcaaccgcagcaacagcagatgttatcttccggcgttggttccgagaataagttagaaagtcttccggctatggttgtgggcgtttggtctgatgacaagaatgcacagcttgaggcaaccactcaattccgaaagctgctatcaatagaacgtagtcctccaatcaatgaagttgtacaagcaggtgttgttcctcgctttgttgagttccttaatagggatgacttccctcagcttcagttcgaggcagcttgggctctcacaaatattgcttcaggaacatcagacaataccagagttgtaattgatcatggagctgtccctatatttgttaaactcctagattctccaacggatgacgtacgcgaacaggctgtttgggcattggggaatgttgctggagactctcctaaatgccgtgacctggtccttggccatgggggcttagtgcctcttttggcacaatttaatgagcatgncaagctctctatgttgcgaaatgctacctggactttgtcaaacttctgcaggggcaaggcacaaccttcgtttgagcagacaangccagcttttgcagctcttgagcggcttatcaattcaaatgatgaggaagtcttgacagatgcatgctgggctctgtcttatctctcagacggtactaatgacaaaatccaagctgttattgaagcagggggatgcccacaacttattgagctctttgctcctccatcccccacgggtcctcattcctgccctttcccaaagttgggaataattggttaa

SEQ ID NO: 356 - protein, 318 aa, Gossypium hirsutum
  misc_feature (218)..(218): Xaa can be any naturally occurring amino acid
  misc_feature (246)..(246): Xaa can be any naturally occurring amino acid
MSLRPSARTEVRRNRYKVAVDAEEGRRRREDNMVEIRKNKREENLLKKRREGLLAQQPQPQQQQMLSSGVGSENKLESLPAMVVGVWSDDKNAQLEATTQFRKLLSIERSPPINEVVQAGVVPRFVEFLNRDDFPQLQFEAAWALTNIASGTSDNTRVVIDHGAVPIFVKLLDSPTDDVREQAVWALGNVAGDSPKCRDLVLGHGGLVPLLAQFNEHXKLSMLRNATWTLSNFCRGKAQPSFEQTXPAFAALERLINSNDEEVLTDACWALSYLSDGTNDKIQAVIEAGGCPQLIELFAPPSPTGPHSCPFPKLGIIG

SEQ ID NO: 357 - DNA, 1593 bp, Glycine max
atgtcgctcaggccaaatgccagaaccgagattcgccgcaaccgttacaaggtcgccgtcgacgccgacgagggccgccggagaagagaggacaacatggtcgagatccgcaagagcaagcgcgaagagagtttgctcaagaagcgtcgtgaaggcctccaagctcagcaacagtttcccgctcctcttcagaactccaccgtcgacaagaagctggagagtcttcctgccatggttgctggagtttggtcggatgataatagtattcaacttgaagccactacgcaatttcgcaagctgctttcgattgaacggagccctccgattgaggaagttattcaagctggtgttgttccacgttttgttgagtttcttgttagagaggatttccctcaacttcagtttgaggctgcgtgggctctcacaaacattgcatctgggacttctgagaacactaaggtggtaattgatcatggggcagttcctatatttgtcaagctacttagttcacctagtgatgatgttcgggagcaggcagtgtgggctttgggaaatgttgctggtgactcccctaggtgtagagatctagtgctcagccaaggtgccctcgtcccactgttggcccagttgaatgagcatgcaaaactttcaatgctgagaaatgccacatggacattatctaacttttgcaggggtaagccacagcctccgtttgagcaggtgagaccggcacttccagcactcgagcgtttggttttttccaatgatgaagaagttttgacagatgcttgctgggcattatcatatctctctgatggcacaaatgacaaaatccaagcagttattgaggcaggtgtatgtgccagattggtgcagcttctcatacacccatctccctcagtgctgattcctgctcttcgtacagtgggaaatattgtgactggagatgatatgcagactcagtgtattatcaatcatggtgcactcccctgccttttgaacctgttgacaaataatcataaaaaaagcattaagaaagaagcttgttggactatatcaaacattactgctggaaataaagaacagatacagactgttattgaagctggtctggttgcaccccttgtcaatcttcttcaaaatgcggaatttgacattaaaaaggaagctgcttgggcaatctcaaatgctacatctggtggaattcatgagcagatcaagtacttggtgagtcagggttgcataaagcctctttgtgatcttcttgtttgcccagacccaagaattgttactgtctgtttagaaggcctagagaatattctgaaggttggagaagctgagaagagcctaggtaacactggagatgttaacgagtatgcacagatgatagatgatgctgagggattggagaagattgaaaacctacagagtcatgacaacaatgaaatatatgaaaaggctgttaaaattcttgaaacatattggttggaagaagaagatgagacactaccttcaggagatggtgctcaacctggtttcaatttcggaaacaatgagcttccagtcccatctggtggattcaacttcagctga

SEQ ID NO: 358 - protein, 530 aa, Glycine max
MSLRPNARTEIRRNRYKVAVDADEGRRRREDNMVEIRKSKREESLLKKRREGLQAQQQFPAPLQNSTVDKKLESLPAMVAGVWSDDNSIQLEATTQFRKLLSIERSPPIEEVIQAGVVPRFVEFLVREDFPQLQFEAAWALTNIASGTSENTKVVIDHGAVPIFVKLLSSPSDDVREQAVWALGNVAGDSPRCRDLVLSQGALVPLLAQLNEHAKLSMLRNATWTLSNFCRGKPQPPFEQVRPALPALERLVFSNDEEVLTDACWALSYLSDGTNDKIQAVIEAGVCARLVQLLIHPSPSVLIPALRTVGNIVTGDDMQTQCIINHGALPCLLNLLTNNHKKSIKKEACWTISNITAGNKEQIQTVIEAGLVAPLVNLLQNAEFDIKKEAAWAISNATSGGIHEQIKYLVSQGCIKPLCDLLVCPDPRIVTVCLEGLENILKVGEAEKSLGNTGDVNEYAQMIDDAEGLEKIENLQSHDNNEIYEKAVKILETYWLEEEDETLPSGDGAQPGFNFGNNELPVPSGGFNFS

SEQ ID NO: 359 - DNA, 1575 bp, Hordeum vulgare; identical to SEQ ID NO: 235

SEQ ID NO: 360 - protein, 524 aa, Hordeum vulgare; identical to SEQ ID NO: 236

SEQ ID NO: 361 - DNA, 1686 bp, Medicago truncatula; identical to SEQ ID NO: 237

SEQ ID NO: 362 - protein, 561 aa, Medicago truncatula; identical to SEQ ID NO: 238

SEQ ID NO: 363 - DNA, 1581 bp, Oryza sativa
atgtcgctgcgcccgagcgagcgggtggaggtgcggcggaaccgctacaaggtggcggtggacgccgaggaggggaggcggcggcgcgaggacaacatggtggagatccgcaagagccgccgcgaggagagcctcctcaagaagcgccgcgaggggctccaggcccaggcccccgtccccgcctccgccgcaaccggcgtcgataagaagctcgaaagccttcctgctatgattggtggagtttattcggacgataacaaccttcagcttgaggccacaacacagttccgcaagttgctttctatagagaggagccctccaattgaagaggttattcaatcaggcgttgttcctagattcgtgcagtttcttaccagagaggatttcccccagctacagttcgaagctgcgtgggcacttacaaacattgcatctggcacttcggagaatacaaaggttgtcattgatcatggggctgtaccaatatttgtgaagcttcttggttcttctagtgatgatgttcgtgagcaggctgtatgggcattgggcaatgttgctggtgattcccctaagtgccgtgaccttgttcttgccaatggtgcattgctgcctctgctagcacagttgaatgagcacactaaactctctatgctaaggaatgcaacttggactttatcgaacttctgcagaggaaaaccacagccatcatttgaacagactaggcctgctcttccagcactggcacggcttattcactccaatgatgaggaagttctcactgatgcgtgctgggctctttcatatttatctgatggcactaatgacaagatccaagccgtgattgaagctggtgtttgcccccgtcttgtggagcttctcctccatccatcaccttcagtgcttatacccgcactacgaactgttggaaatattgtaactggagatgacgcgcaaactcagtgcatcattgatcatcaagccctcccttgcctcctaagtctgttgacacaaaatctcaagaaaagcatcaagaaagaggcttgctggactatttcaaatattactgctggtaacaaagatcagatacaggctgtcataaatgctggcattattggtcctctggtgaatctgctccaaacggcagagttcgatatcaagaaggaagctgcatgggccatctcaaatgctacttcaggcggtagccatgatcaaatcaagtatctggtgagcgagggctgcatcaagccattgtgtgatcttcttatttgcccagatataagaatcgttacagtttgtttggagggtctcgagaacattcttaaagtaggagaaaccgacaagaccttggctgcaggtgatgtgaatgtcttttcccagatgattgatgaagcggaaggtttggaaaagattgagaacttgcagagccatgataacaatgagatctatgaaaaagctgtgaagattcttgaggcctactggatggatgaggaggatgatacaatgggagctaccacggtagctgctccccaaggtgctacttttgactttggccaaggcggtggtgctgctcaattcaaataa

SEQ ID NO: 364 - protein, 526 aa, Oryza sativa
MSLRPSERVEVRRNRYKVAVDAEEGRRRREDNMVEIRKSRREESLLKKRREGLQAQAPVPASAATGVDKKLESLPAMIGGVYSDDNNLQLEATTQFRKLLSIERSPPIEEVIQSGVVPRFVQFLTREDFPQLQFEAAWALTNIASGTSENTKVVIDHGAVPIFVKLLGSSSDDVREQAVWALGNVAGDSPKCRDLVLANGALLPLLAQLNEHTKLSMLRNATWTLSNFCRGKPQPSFEQTRPALPALARLIHSNDEEVLTDACWALSYLSDGTNDKIQAVIEAGVCPRLVELLLHPSPSVLIPALRTVGNIVTGDDAQTQCIIDHQALPCLLSLLTQNLKKSIKKEACWTISNITAGNKDQIQAVINAGIIGPLVNLLQTAEFDIKKEAAWAISNATSGGSHDQIKYLVSEGCIKPLCDLLICPDIRIVTVCLEGLENILKVGETDKTLAAGDVNVFSQMIDEAEGLEKIENLQSHDNNEIYEKAVKILEAYWMDEEDDTMGATTVAAPQGATFDFGQGGGAAQFK

SEQ ID NO: 365 - DNA, 1599 bp, Physcomitrella patens
atgtctcttcgaccgaacgcccgagtggaaggtcgcaagaaggggtacaaactcgcggtcgatgccgatgaggcgcgcaggaagagggaggacaatatggtggagattcggaagagcaagagggaggagagtttattgaagaagcggagggatggtatgccgcagctgccgcagtttgtcccgtccgctcagagctctctgtctgacaagaagcaacttgagagccttccagcgttggtttctggtctttactctgacgatcctgctacccagttggaagcaaccacacaatttcgaaagcttctgtctatcgagcggagtcctcccattgaagaagtgatttccgctggtgtcgtcccccgtttcgtggagtttctagtcaggagcgattttccgcagttgcagttcgaggcggcatgggctttgacaaatattgcatcagggacttctgatcacacacgtgttgtcatcgaccatggtgctgttcccatctttgttcagctcctaagctctcccagtgacgatgtccgagaacaggctgtatgggctttgggaaacgttgctggtgattcgccgaaatgccgtgaccttgttttaggtcatggggccttgatgcctctgcttgcgcagcttacggagaacacaaaattgtctatgcttagaaacgctacctggactctctccaacttctgtcgtggcaagcctcaaccaccttttgagcagtcgaaaccagcgcttccggccttggagcggctcattcactcaaacgatgaagaggttctcacggatgcttgctgggcactatcttatttatccgatgggacgaatgacaagattcaggccgtgattgaggctggcgtctgtcgtcgacttgtggagttattgctccatccatcgccctctgtactcattcccgcgctgcgtactgttggcaacattgtgactggtgacgatcttcagacacagttcatcatcaataatcaggcccttccctgtcttcttgctcttctgaccaacaatcacaagaaaagtatcaagaaagaagcctgttggactatttccaatataactgcaggaaacaaggatcaaatccaggctgttattgatgccaacatcattccacctttggtatctcttcttgccaccgcagaatttgacatcaagaaggaagctgcttgggctatttcaaatgccacttctggtggcagtcacgatcagataaagtaccttgttacccaaggttgcattaagccactatgtgaccttctaacatgtccagatccgagaatcgtcactgtgtccctcgaagggctggaaaacattttgaaggttggggagcaggagaaagatcttggccagagtggtggtatcaacctttatgcccgctacatcgatgaagccgagggtttggagaagattgagaacttgcagacacacgataacaacgagatttatgaaaaggctgtgaagattctggagacttattggctagaagaggatgaggattcgaatgcggcacctggcacggaaggccaaaccttcgcgtttggttcaagcaacgctgcaggcgctcctgccggtggcttccactttggctaa

SEQ ID NO: 366 - protein, 532 aa, Physcomitrella patens
MSLRPNARVEGRKKGYKLAVDADEARRKREDNMVEIRKSKREESLLKKRRDGMPQLPQFVPSAQSSLSDKKQLESLPALVSGLYSDDPATQLEATTQFRKLLSIERSPPIEEVISAGVVPRFVEFLVRSDFPQLQFEAAWALTNIASGTSDHTRVVIDHGAVPIFVQLLSSPSDDVREQAVWALGNVAGDSPKCRDLVLGHGALMPLLAQLTENTKLSMLRNATWTLSNFCRGKPQPPFEQSKPALPALERLIHSNDEEVLTDACWALSYLSDGTNDKIQAVIEAGVCRRLVELLLHPSPSVLIPALRTVGNIVTGDDLQTQFIINNQALPCLLALLTNNHKKSIKKEACWTISNITAGNKDQIQAVIDANIIPPLVSLLATAEFDIKKEAAWAISNATSGGSHDQIKYLVTQGCIKPLCDLLTCPDPRIVTVSLEGLENILKVGEQEKDLGQSGGINLYARYIDEAEGLEKIENLQTHDNNEIYEKAVKILETYWLEEDEDSNAAPGTEGQTFAFGSSNAAGAPAGGFHFG

SEQ ID NO: 367 - DNA, 1590 bp, Populus trichocarpa
atgtcgttgagacctagcgcgagaaccgaggttcgccggaaccgatacaaagtcgcagtcgacgccgatgaaggtcgccggagaagagaggacaatatggtggagatccgcaagaacaagcgtgaagagagtttgctaaagaagcgacgcgaaggtctccaggcacaacagttccctcccgctattctctcttcttctaatgtggaaaagaagttagagaatttgccttcgatggtggctggtgtttggtctgaggatggcaatttgcagcttgaatcaactactcagtttcggaaactgctttcgattgagaggagtcctccgatagaggaagttatacaagctggggttgttcctcgatttgttgagtttcttgttagggaggatttccctcagcttcagtttgaggctgcttgggctctcacaaacattgcctctggaacttcagagaacactaaggtggtaattgatcatggtgcagttccaatatttgtcaagcttctcggttctcccagtgatgatgttagggagcaggctgtgtgggcattgggaaatgttgctggtgactcccctaagtgccgtgatcttgtgctcagccatggagccttgattccattgctggcacagttgaatgagcatgcaaagctttcaatgctgaggaatgctacgtggacactatcaaacttctgcaggggcaagccacagcctccgttcgagcaggtgaggccagcccttcctgcacttgaacgtcttgtacattcaactgatgaagaagtcctaactgattcttgctgggcactctcttatctttctgatggtacagatgataaaatccaagctgttattgaggcaggtgtctgtccacgacttgtggagctcctcctccatccttctccttcagtgcttgttcctgccctccgcacagttggaaatattgtgacaggggatgatatgcagacccagtgcataattaccactggtgcactcccatgccttctaagcctgctgactcataatcataaaaagagcatcaagaaagaagcttgctggactatctcaaacatcactgctggaaacaaggagcagatccaggctgttattgagaatggtttaattggcccgctcgttaatttacttcaaaatgcggagtttgatataaagaaagaagctgcttgggctgtgtctaatgctacttcgggtggcactcacgagcaaattaagtttttggtcagtcagggatgtattaaaccattgtgtgatcttcttgtatcccctgatccaaggattgtaactgtatctcttgaaggattagagaacattctgaaggttggggaagcggagaagaatttggggaatagtggagatgctaatttctatgcccagatgatagatgatgccgagggactagaaaagattgaaaatctacagagtcatgacaacaatgagatatatgagaaggcagtcaagattctcgagacttattggttggaagaagacgacgagactttgccttcaggtgatggtgcccagcaaggatttcagtttggtgggaacggtgttcaagttccatctggtggattcaacttttag

SEQ ID NO: 368 - protein, 529 aa, Populus trichocarpa
MSLRPSARTEVRRNRYKVAVDADEGRRRREDNMVEIRKNKREESLLKKRREGLQAQQFPPAILSSSNVEKKLENLPSMVAGVWSEDGNLQLESTTQFRKLLSIERSPPIEEVIQAGVVPRFVEFLVREDFPQLQFEAAWALTNIASGTSENTKVVIDHGAVPIFVKLLGSPSDDVREQAVWALGNVAGDSPKCRDLVLSHGALIPLLAQLNEHAKLSMLRNATWTLSNFCRGKPQPPFEQVRPALPALERLVHSTDEEVLTDSCWALSYLSDGTDDKIQAVIEAGVCPRLVELLLHPSPSVLVPALRTVGNIVTGDDMQTQCIITTGALPCLLSLLTHNHKKSIKKEACWTISNITAGNKEQIQAVIENGLIGPLVNLLQNAEFDIKKEAAWAVSNATSGGTHEQIKFLVSQGCIKPLCDLLVSPDPRIVTVSLEGLENILKVGEAEKNLGNSGDANFYAQMIDDAEGLEKIENLQSHDNNEIYEKAVKILETYWLEEDDETLPSGDGAQQGFQFGGNGVQVPSGGFNF

SEQ ID NO: 369 - DNA, 1590 bp, Solanum lycopersicum; identical to SEQ ID NO: 245

SEQ ID NO: 370 - protein, 529 aa, Solanum lycopersicum; identical to SEQ ID NO: 246

SEQ ID NO: 371 - DNA, 978 bp, Triticum aestivum
  misc_feature (885)..(885): n is a, c, g, or t
atgtcggtgcgtccgagcgagcgggccgacgcgcggcggaaccgctacaaggtgacggtggacgccgatgaggggcggcggcggcgcgaggacaacatggtggagatccgcaagaaccgccgcgaggagagcctcctcaagaagcgccgcgaggggctccaggcccaggctcctatccccgccgccggcgtcgagaagaagcttgaaagcttacctgctatggttggtggggtttattccgaggataacaacctgcagcttgaggcaacgacacaattccgcaagttgctttctatagaaaggagccccccaatcgaagaagttatccaatcaggcgttgttcctcgatttgtgcagtttcttactagagaggatttcccccaactccagtttgaagcagcgtgggcactcacaaacattgcgtctggcacatcagagaataccaaggttgtcattgatcatggggcagttccaatatttgtgaagcttcttgcatctggcagcgatgatgttcgtgagcaggctgtctgggcattgggcaatgttgctggtgactccccaaagtgccgcgaccttgtactcgcaaatggtgcattgatgcctctgctagcacagttgaatgagcatgctaaactctccatgttaaggaatgcgacctggactttatcaaatttctgcagaggaaagccacagccagcatttgatcagactaagcctgctctgccagcacttgcacgacttatccattccaatgatgaggaagttttaactgatgcatgctgggctctttcgtatctctctgatggcaccaatgacaagatccaatctgtgattgatgctggtgtctgtcctcggcttgtggagcttctcctccatcatcacctnaagggcttatactggcctagaactggtggaatatggtccagggagatactccaaaaccaggggttattgatcatcagctctggggtgtcctaa

SEQ ID NO: 372 - protein, 325 aa, Triticum aestivum
MSVRPSERADARRNRYKVTVDADEGRRRREDNMVEIRKNRREESLLKKRREGLQAQAPIPAAGVEKKLESLPAMVGGVYSEDNNLQLEATTQFRKLLSIERSPPIEEVIQSGVVPRFVQFLTREDFPQLQFEAAWALTNIASGTSENTKVVIDHGAVPIFVKLLASGSDDVREQAVWALGNVAGDSPKCRDLVLANGALMPLLAQLNEHAKLSMLRNATWTLSNFCRGKPQPAFDQTKPALPALARLIHSNDEEVLTDACWALSYLSDGTNDKIQSVIDAGVCPRLVELLLHHHLKGLYWPRTGGIWSREILQNQGLLIISSGVS

SEQ ID NO: 373 - DNA, 1470 bp, Zea mays
atgtcgctccggccgagcgagcgggagcagatgcggaagggcaactacaagcagacggtggacgccgaggagagccgccgccgccgcgagggccagatggtcgacatccgcaaggccaagcgagaggaaagcctccagaagaagcgccgcgatgggttccccgccgccggcgccgtgccgccgatgggccactccaccgcactccagcagaagctcgatggcttgccggcgatggtacaggccgttcactccaacgaccccactgtgcagcttgaggccaccacgcagttcaggaagctgctctccatagagcgtagtcccccaattgaagaggtgatcagcacaggagtcgtgccccgattcattgagttccttacacgtgaggaccatccacaactccagtttgaggctgcatgggcgctcaccaacattgcatcaggcacatcagagaacactaaggtggtggttgagagtggtgctgtgcccatctttgttaagctcctcaactccaatagcgaggatgttcgtgaacaggctgtatgggctttaggtaatgttgctggtgactccccaaagtgccgtgatctggtgctaggccatggtgggctattccccttgctgcaacagcttaatgagcatgctaagctctcgatgctgaggaatgccacatggacactatcaaacttctgccgtgggaagccacaaccgaactttgatcaggtcaaaccagcattgccagcacttcagcaacttatccactctcaggatgaggaggtcctaactgatgcctgttgggctctatcatacctatctgatgggactaatgacaaaatccaagctgttattgaatctggcgtgttccctcgccttgtggaacttctgatgcatccttcagcctctgtactgattccagctctgcgcacggtgggtaacatcgtaactggggacgacatgcagactcagtgtgtcattgacaatcaagcacttccatgccttttgaacctactgaccaccaaccacaagaaaagcatcaagaaagaagcatgctggacaatctcaaacatcacagctggtaacagggaacagattcaggccgtgattaatgcaaacataattgcacctctggtgcaacttctgcaaactgctgaatttgacatcaagaaagaagcagcctgggcaatttcaaatgccacttctggtggcacacatgatcagatcaagtaccttgttgcccagggttgcattaagccactctgtgatctgcttgtttgcccggatcccagaatcgtaacagtttgcttggagggtctcgagaacatcctgaaagttggcgaggcagagaaaaaccttggtgcaggcgatgtcaatgtctacgcacagatgattgatgatgctgagggcctggacaagattgagaactgcagagccatgacaacaccgagatatatgagaaggctgtcaagatgctga

SEQ ID NO: 374 - protein, 489 aa, Zea mays
MSLRPSEREQMRKGNYKQTVDAEESRRRREGQMVDIRKAKREESLQKKRRDGFPAAGAVPPMGHSTALQQKLDGLPAMVQAVHSNDPTVQLEATTQFRKLLSIERSPPIEEVISTGVVPRFIEFLTREDHPQLQFEAAWALTNIASGTSENTKVVVESGAVPIFVKLLNSNSEDVREQAVWALGNVAGDSPKCRDLVLGHGGLFPLLQQLNEHAKLSMLRNATWTLSNFCRGKPQPNFDQVKPALPALQQLIHSQDEEVLTDACWALSYLSDGTNDKIQAVIESGVFPRLVELLMHPSASVLIPALRTVGNIVTGDDMQTQCVIDNQALPCLLNLLTTNHKKSIKKEACWTISNITAGNREQIQAVINANIIAPLVQLLQTAEFDIKKEAAWAISNATSGGTHDQIKYLVAQGCIKPLCDLLVCPDPRIVTVCLEGLENILKVGEAEKNLGAGDVNVYAQMIDDAEGLDKIENCRAMTTPRYMRRLSRC

SEQ ID NO: 375 - DNA, 1113 bp, Brassica napus
atggcgacgcattccatctctcgctccattctctgccgtccggcgaaatctctctcccttctcttcacccgatccttcgcctcatctgctcctctcgccaaagctccggcgacttcgctttacacgtcgtctctgctcacccgatcccgtcccttagtcgccgccttgtcatccgctttccgcggtggacttgtgtctgtcaaaggtctttcttcgcaggctacatcgtcttctctgaacgatccgagtcccaactggtccaacaggcctccaaaggagacgattttgctcgatggatgcgatttcgagcattggcttgtggttgtggatccgcctgagggagatcccactagagatgagatcatcgacagctatatcaaaaccctagctcagatcgttggcagtgaagaagaagcgaggatgaagatctactctgtttcgactcgatgttactttgcttttggagctcttgtgtctgaagatctctctcacaagctgaaagagttgccaaaggtgcgctgggtccttcctgattcgtacctggatgtgaggaacaaagactacggaggggaacctttcattgatgggaaagctgttccttatgaccccaagtaccacgaggaatggataaggaacaatgctagagccaatgaaagaaacaggcgcaatgaccgtcctaaaaactttgatagaagcagaaactttgagaggagaagagagaacatggcaggaggccctcctccccaacgtcctcccatgggtggccctcctccacctcacatgggtggctctgcaccccctccacctcccatggggcagaattatggacaaaggcctccaccaaactacggaggaccaccaccaccaaattacggaggaacgccaccacaaaacaacatgggaggagcaccaccaccaaactacggaggagcgcctccaccgaactatggaggagcaccaccaccgcagaacaacatgggaggaggaggtccaccaaatgcaggatggtcaggtaacaaccactaccagcagcagcagggtggtggaatgcagcagccacagtaccagaacaactatccacctaaccgggatggcagcgggaacccgtactag

SEQ ID NO: 376 - protein, 370 aa, Brassica napus
MATHSISRSILCRPAKSLSLLFTRSFASSAPLAKAPATSLYTSSLLTRSRPLVAALSSAFRGGLVSVKGLSSQATSSSLNDPSPNWSNRPPKETILLDGCDFEHWLVVVDPPEGDPTRDEIIDSYIKTLAQIVGSEEEARMKIYSVSTRCYFAFGALVSEDLSHKLKELPKVRWVLPDSYLDVRNKDYGGEPFIDGKAVPYDPKYHEEWIRNNARANERNRRNDRPKNFDRSRNFERRRENMAGGPPPQRPPMGGPPPPHMGGSAPPPPPMGQNYGQRPPPNYGGPPPPNYGGTPPQNNMGGAPPPNYGGAPPPNYGGAPPPQNNMGGGGPPNAGWSGNNHYQQQQGGGMQQPQYQNNYPPNRDGSGNPY

SEQ ID NO: 377 - DNA, 1260 bp, Gossypium hirsutum
atggcgacccaatccctctctcgctatctcctctccaaaccaaaatccctaacctccttcctcttcccttcatgcccccctttctcttccttttcccccgccgccgccgcttcccccgtgaaaaccctaataacctcatcgccatccccttccctctttttcctccgtcgtctccgtgccccactttgctactcgctcctccttcgcgactcacttttccccactgtcaaatcgttctccactcgagcagccaggtcctctctcaatgacccgagtcctaattactcgaatcgtcccccgaaggagacaatattgctcgacggctgtgattttgagcattggctcgttgtggtggagccccctaaagaggatgctactagggatgaaattattgatagttatatcaaaaccctagctcaagtagtgggcagtgaagacgaagctagaatgaaaatttattcagtttctactcggcattattatgcctttggagcccttgtttctgaagagctctcgtacaagatcaaggaacttcctggagttcgttgggttcttccagattcttacttggacgtgaagaataaagattatggaggtgaacctttcattaatgggcaagctgtgccttatgatcccaagtaccatgaggaatgggtgaggaacaatgcacgtgcaaatgaaagaaatagacgtaatgacaggcctcgtaattatgacagatcaagaaactatgagagaagaagggaaaacatgcagcctcctcctaaccagggtatgcagaatgcttctcctaatacagctagaagtccacctcctaacaacatgggaggaatgccttacaacaataggggaagtatgcatgccaacaacatggggggaggaatgcctcctcctaacaatatgggaggaatgccgcctcctaacaatatgggaggaatgccgcctcctaacagtatgggaggaatgccgcctcctaacagtatgggaggaatgccaccgcggaacaacatgggaggaggaatgccgcctcctaacaatatgggaggaatgccgcctcctgacaacatgggaggaggaatgccgccgccgaacaacatgggtgggatgccaccgggaccaccgaatcaaggatggtctggtaacatgggtggaaatgctcagaatttccaaaatccttaccaaggtaatacacagaatgtgcaatatccgaataaccatccgccaaatatgggcgggcctggtgggaattaccagtcttag

SEQ ID NO: 378 - protein, 419 aa, Gossypium hirsutum
MATQSLSRYLLSKPKSLTSFLFPSCPPFSSFSPAAAASPVKTLITSSPSPSLFFLRRLRAPLCYSLLLRDSLFPTVKSFSTRAARSSLNDPSPNYSNRPPKETILLDGCDFEHWLVVVEPPKEDATRDEIIDSYIKTLAQVVGSEDEARMKIYSVSTRHYYAFGALVSEELSYKIKELPGVRWVLPDSYLDVKNKDYGGEPFINGQAVPYDPKYHEEWVRNNARANERNRRNDRPRNYDRSRNYERRRENMQPPPNQGMQNASPNTARSPPPNNMGGMPYNNRGSMHANNMGGGMPPPNNMGGMPPPNNMGGMPPPNSMGGMPPPNSMGGMPPRNNMGGGMPPPNNMGGMPPPDNMGGGMPPPNNMGGMPPGPPNQGWSGNMGGNAQNFQNPYQGNTQNVQYPNNHPPNMGGPGGNYQS

SEQ ID NO: 379 - DNA, 1206 bp, Glycine max
atggcgactcagatcctctctcgcatcttccccaaaaccctagcccccttcctctcccgttctctctccaccgccccctctcctccctccctctccgcgctctccttcctccgccgcatctccgttgccgccaacccctccctccaccgcgccctcctccccaactctccctccctccgcgccctctccacacgcgccactacctcctccctcaacgaccccaaccctaactggtccaaccgtcccccgaaagaaaccatcttgctcgacggctgcgatttcgaacactggctcgtcgtcatggagaagcccgagggagaccccacacgcgatgacatcatcgatagctacatcaaaacattggccaaggtcatcggaagtgaagaggaggcgagaatgaagatatattcggtctcgactaggcactactttgcgtttggggctcttgtgtctgaagagctttcttacaagattaaagaattgcctggagttcggtgggtgcttcctgattcttacttgaatgttaaggaaaaggattatggaggtgagccctttattaacgggcaagctgctccctatgatcccaagtatcacgaagagtgggttagaaacaatgctcgtgccaatgagagaaacaggcgcaatgacaggcctcgtaatgctgacaggtcaagaaactttgagaggaggagggaaaatgtggtaaacagagacatgcagggcaggcctccttcgccaaatcctggccctaatgtgggcggtcctcctccaagcaatgcagctgggtaccctccaagcaatgcagctgggtaccctcctagcaatgcaggatatgcccctccaagcaatacaggcgggtaccctcctagcaatgcaggatatgcccctccaagcaatgcaggcgggtaccctccgagcaatgcaggctatgcccctccgagcaatgcaggctatgcccctccaaatacagctggatattcttctccgaacgccgcaggaggttaccctcctaatgcaggtggtggctatggtcctggtggtggtgtgcctcagaataactacgcagggaacatgggagggccaccatcaaaccagaacatgggagggtttcaacaaaattcaggatggtcgaacaatgctcccagtagagatgtgccaagcagggatatgggaggaccacctggtgggaacccatattctgggtga

SEQ ID NO: 380 - protein, 401 aa, Glycine max
MATQILSRIFPKTLAPFLSRSLSTAPSPPSLSALSFLRRISVAANPSLHRALLPNSPSLRALSTRATTSSLNDPNPNWSNRPPKETILLDGCDFEHWLVVMEKPEGDPTRDDIIDSYIKTLAKVIGSEEEARMKIYSVSTRHYFAFGALVSEELSYKIKELPGVRWVLPDSYLNVKEKDYGGEPFINGQAAPYDPKYHEEWVRNNARANERNRRNDRPRNADRSRNFERRRENVVNRDMQGRPPSPNPGPNVGGPPPSNAAGYPPSNAAGYPPSNAGYAPPSNTGGYPPSNAGYAPPSNAGGYPPSNAGYAPPSNAGYAPPNTAGYSSPNAAGGYPPNAGGGYGPGGGVPQNNYAGNMGGPPSNQNMGGFQQNSGWSNNAPSRDVPSRDMGGPPGGNPYSG

SEQ ID NO: 381 - DNA, 1248 bp, Hordeum vulgare
atggcgtcggcgtcgcgcgcgctcctcctctccagggcctcgcccctccacgccgccgcctcccgcttcctccgcccgctcgccgccgcggggagcctcctcccggcggcgctggtcccgtcccccgccgcggcgccctgggcggcggcgaggcgattcgcgacgcagcccgccaactcgtcgctgcgggactcgtccccgaactggagcaaccgcccgcccaaggagacgatcctcctcgacggctgcgacttcgagcactggctcgtcgtcatggagccgcccccaggcgacggcgccaaccccgacgtcacccgcgacgagatcatcgacgggtacatcaagaccctcgcacaggtcgtcggaagtgaagatgaagccaggatgaagatctactctgtgtcaactaggcattattttgcttttggtgccctagtatctgaggaactctcctacaaactcaaagagttgcctaaggtccgttgggttcttcctgattcatacctcgatgtcagaaataaggactatggaggagaaccatttatagatggacaagctgttccttacgaccccaaataccatgaggagtgggtgagaaacaatgcccgtgccaatgagagatcccggcgcaacgacaggcctcgcaactttgacaggtcgaggaactttgaaaggagaagggagaacacacaggcctaccagagcgggcctgctccaccagggcagagccaaatgccaccccatgatgctgctcctccaaggcgtcctccacagggcccgccaccgccttcgggtgccccaccaaattaccagtcccatgccccaaacccacaggcgggctatgttccaggaggtggaccaaactatcagaatgcaccgccgccccctggataccaaggtgccccaacccctggataccaaggtgccccaacccctgggtaccaagctggtaaccaaggctaccaaggtaatcctggtggtaacatgcagaatggaccaggcccagcccatcatagcaacaaccctggataccaccagggtggagggccaggtgtcaacccgtcgcccccttttgcaggtggcaaccagcctcctccctaccaaggcagtggccctagctatggtggtggtgcaccaggctaccagggccagccaggtaacccaggctacgaaggtggcggtaactacaacaacgccgcccctcctccctatgagggcagggacgggccagggaggaactaccagtag

SEQ ID NO: 382 - protein, 415 aa, Hordeum vulgare
MASASRALLLSRASPLHAAASRFLRPLAAAGSLLPAALVPSPAAAPWAAARRFATQPANSSLRDSSPNWSNRPPKETILLDGCDFEHWLVVMEPPPGDGANPDVTRDEIIDGYIKTLAQVVGSEDEARMKIYSVSTRHYFAFGALVSEELSYKLKELPKVRWVLPDSYLDVRNKDYGGEPFIDGQAVPYDPKYHEEWVRNNARANERSRRNDRPRNFDRSRNFERRRENTQAYQSGPAPPGQSQMPPHDAAPPRRPPQGPPPPSGAPPNYQSHAPNPQAGYVPGGGPNYQNAPPPPGYQGAPTPGYQGAPTPGYQAGNQGYQGNPGGNMQNGPGPAHHSNNPGYHQGGGPGVNPSPPFAGGNQPPPYQGSGPSYGGGAPGYQGQPGNPGYEGGGNYNNAAPPPYEGRDGPGRNYQ

SEQ ID NO: 383 - DNA, 1128 bp, Medicago truncatula
atggcgaaccagatcttctctcgcgtcatccccaaaaccctaaccctaaccaccttcctctctcgctccttctccaccacaaccaccaatccctcttcctccgctctctcctttctccgccgtctccgccctctctccgccaccgccatcacctcccgtcacatcctcctcccttccttccgcgctttctccacacgccctaccacctcttccctcaacgatcctaaccctaattggtctaatcgtccaccaaaggaaacgattttgctcgatggatgcgattttgaacactggcttgttgtgatggagaagcctgaaggtgatcctaccagagatgagattattgatagttacatcaaaaccttagctgaggttatcggaagtgaagaagaggctaggaagagcatatattctgtttcaactagacactactttgcttttggagctctttgttctgaagagctttcctacaaactgaaagaactgcccaaggttcgatgggttcttcctgattcttatttgaatgtgagggagaaagattatggaggtgagcccttcattaatgggcaagcagttccatatgatcccaagtatcatgaggagtgggttaggaacaatgctcgtgctaatgaaaggaacaggcgcaatgataggcctcgtaataacgacaggtcaagaaattttgaaaggagaagggaaaatgtggtgaacagagacatgcagagtaggcctccagtgcagaattctggtccacctcccaacaattcttctggataccctcccaacaattcttctggataccctcccaacaatgctggcggataccctcctaacaatcaagctggatactcccctccaaatcaatctggatactcccctccaaatcaagctggatacgcccctccaaatcaaggcggatacgcccctccaaatcaaggtggatatgctcctccaaatgcaggtggtggataccctccccccaacatgagcggaccccctcctcctaacatgagcagacctcctcctcccaacagtggatacggtgctcctcaaaataactacctggggcaacaaaaccagaacattgcagggatgcctccaaatgctggatggtcaaataatcagtag

SEQ ID NO: 384 - protein, 375 aa, Medicago truncatula
MANQIFSRVIPKTLTLTTFLSRSFSTTTTNPSSSALSFLRRLRPLSATAITSRHILLPSFRAFSTRPTTSSLNDPNPNWSNRPPKETILLDGCDFEHWLVVMEKPEGDPTRDEIIDSYIKTLAEVIGSEEEARKSIYSVSTRHYFAFGALCSEELSYKLKELPKVRWVLPDSYLNVREKDYGGEPFINGQAVPYDPKYHEEWVRNNARANERNRRNDRPRNNDRSRNFERRRENVVNRDMQSRPPVQNSGPPPNNSSGYPPNNSSGYPPNNAGGYPPNNQAGYSPPNQSGYSPPNQAGYAPPNQGGYAPPNQGGYAPPNAGGGYPPPNMSGPPPPNMSRPPPPNSGYGAPQNNYLGQQNQNIAGMPPNAGWSNNQ

SEQ ID NO: 385 - DNA, 1191 bp, Oryza sativa
atggcgtcggcgtcgcgcttcctcctcctctccaggctccccgccgccgccgcctcctccacctcccgcctcctccgcccgctctccgccgcggggagcctcctcccggcggcgctcgccccctccgccccgcgcgcggcggcggcggcggcgaggtgcttcgccacgcagcccgcgacctcctcgctgcgggactcgtcgccgaactggagcaaccggccccccaaggagacgatcctcctcgacgggtgcgacttcgagcactggctggtcgtcgtggagccgccccccggcgatccctccaacccggagcccacccgcgacgagattatcgacggctacatcaaaaccctcgcacaggtggttgggagtgaggaagaagcaaggcataagatctactcagtgtcaactcggcattactttgcttttggagctcttgtatctgaggaactctcctacaaactcaaagagttgcccaaggtccgctgggttcttccagactcatacctggatgtcagaaataaggactacggaggagaaccttttataaatggggaagccgttccttatgaccctaagtaccacgaggagtgggtgagaaacaatgcgcgtgccaatgaaagaagccggcgcaatgataggcctagaaactttgacaggtcaaggaattttgagaggagaagggagaacatgcagaacttccagaacagagatgtgcctcctggccagggattcaacagccctcccccaccaggtcagggcccagtcccgcctcgtgatgctcctccgatgcaccatgctcagggtaatgttcctccacctccaccaccaaatgcaggtcctccaaactaccagccccatgcaccaaatccgcaaggctatacaaactatcagcagggcggtgcgcctggctaccaaggtggaccccctggctatcaaggtagcaaccagggctaccaaggtccacccccacccccaccatctgcttaccaaggcaacaaccctggataccagggaggagggccaggttaccagggcggcaacccgcctccttaccaaggtggcaaccctggctatgcaccaggctaccatggccaaggaggcaaccctagctaccagcaaggcggcgataactacaatgccggtgtgccggcttatgagagggacggacaagggaggaattaccagtag

SEQ ID NO: 386 - protein, 396 aa, Oryza sativa
MASASRFLLLSRLPAAAASSTSRLLRPLSAAGSLLPAALAPSAPRAAAAAARCFATQPATSSLRDSSPNWSNRPPKETILLDGCDFEHWLVVVEPPPGDPSNPEPTRDEIIDGYIKTLAQVVGSEEEARHKIYSVSTRHYFAFGALVSEELSYKLKELPKVRWVLPDSYLDVRNKDYGGEPFINGEAVPYDPKYHEEWVRNNARANERSRRNDRPRNFDRSRNFERRRENMQNFQNRDVPPGQGFNSPPPPGQGPVPPRDAPPMHHAQGNVPPPPPPNAGPPNYQPHAPNPQGYTNYQQGGAPGYQGGPPGYQGSNQGYQGPPPPPPSAYQGNNPGYQGGGPGYQGGNPPPYQGGNPGYAPGYHGQGGNPSYQQGGDNYNAGVPAYERDGQGRNYQ

SEQ ID NO: 387 - DNA, 1227 bp, Populus trichocarpa
atggcgacttcactcttcactcgctctctcttcctccaaaaacccacctcacaaaccctaatttcctccctcctctctcgcgccttcacttcccactcctccacctccaccgcctgttcctcctctctcctccgccgattcctccgtcctctctcctctgcaaccaccatcaatcgctccgtctctcggatttcaatcaggtcgttttcttccagtcagaaatcgtcttccctcaacgacccaagccctaactggtctaatagacctccaaaagagactattttgcttgatggctgtgatttcgagcattggctcgtcgttatggaaaagcctgagggagaccccactcgtgacgagatcatcgattcttatattaaaactcttgctcaagttgttggcagtgaggaagaagcaaggaggaagatctattcagtttctactcgatgctattatgcctttggagctctggtgcctgaagaggtttcttacaagattaaagaattgaaaaatgtccgctgggttcttcctgattcatacctggatgtgaagaacaaagattatggaggcgagccatttattgatgggaaagctgtgccctatgacccaaaataccatgaggaatggattaggaacaatgcgagggcaaatgaaagaaataggcgcaatgatcgacctcgtaacgtcgacagatcaaggaactttgacagaagaatggaaaacatgcagccgcgaggtggagctccacctcctcctatggctaatcaggctatgcgaaaccctgctcccaacatggctggacaaccacaaaacatgggcagacaaggtgcaccaccgcagccacaaaacaactacaggggaccaggtggaccgccacctaacaactataatatgggtggaccaggtggaccgccacctaacaactatatgggtgggcagcagaacaatatgagtagggtgccacataacatgcccatgcaaaactacattcctccacagaacaacatgcccccgcagaacaatatgccccctcaaaactacaccccccaacaacacaactacattcctccgcagaacaacatgcctccacataacaacacaggaggatggtccaatgacatgcctggaaacatgcaacacaacatccagaatgagcctgccaatggaggctaccaaggtggaccatcaaactaccataacaaataccctccaagccaggatgctgtgtag

SEQ ID NO: 388 - protein, 408 aa, Populus trichocarpa
MATSLFTRSLFLQKPTSQTLISSLLSRAFTSHSSTSTACSSSLLRRFLRPLSSATTINRSVSRISIRSFSSSQKSSSLNDPSPNWSNRPPKETILLDGCDFEHWLVVMEKPEGDPTRDEIIDSYIKTLAQVVGSEEEARRKIYSVSTRCYYAFGALVPEEVSYKIKELKNVRWVLPDSYLDVKNKDYGGEPFIDGKAVPYDPKYHEEWIRNNARANERNRRNDRPRNVDRSRNFDRRMENMQPRGGAPPPPMANQAMRNPAPNMAGQPQNMGRQGAPPQPQNNYRGPGGPPPNNYNMGGPGGPPPNNYMGGQQNNMSRVPHNMPMQNYIPPQNNMPPQNNMPPQNYTPQQHNYIPPQNNMPPHNNTGGWSNDMPGNMQHNIQNEPANGGYQGGPSNYHNKYPPSQDAV

SEQ ID NO: 389 - DNA, 1176 bp, Solanum lycopersicum
atggcgactcgttatcttactcgttctctactcactactctctctcgctcatacactactctttctctctctacacctcttccatcttctttctctctcctccgttttcgtcctctcatcgccgtcgcagcgaatcttcgaacatttactccggcgacgttaacggcggcgacgtcgtttagaggtttcgcgactcgtcaaacgtcgtcgtcgttgaatgacccgaacccgaactggtctaatcgtccaccgaaggagacgattttgcttgatggatgtgattttgagcactggcttgttgtgatggagaagcctgaaggtgatcctacaagagatgagattattgatagttacatcaaaactcttgctacgattgtcggaagtgaggaggaagcaagaatgaagatctactctgtctcgacaagacattactttgcatttggagctcttgtatccgaagaactttcttacaagctcaaagaattgccgaaggttagatgggtgcttcctgattcctacctggatgttaaaaataaagattatggaggagaaccttttattaatgggcaggctgtaccctatgacccgaaataccacgaggagtgggtgaggaacaatgcccgagctaatgagagaaacagacgtaatgaccgacctcgtaactttgatagatccagaaattttgagagaagaagagagatgcagaaccctggatccagtatgggtggtggacctcccaatatgagaaatgctccaccccctaacatgggtgaaatgcagcagcagcagcaacctaacatgggcggaatgcagcagcagcaacctaacatgggaggtatgcaccagcaacagcagcccaacatgggcgggatgcaccagcctggcatgggagggccaccgcctaactatggtggagggcctcccagaaactatggtggagcacctcccaataactatggtggagcaccaaacaatcaatataatggtggaccaaacaatgggggcggcatgccttaccaaacaggtccaggaccaaaccagaactatgcatctggtggaaaccattatcagaacccaaatatgccccctccaagtcagaactatgctccgaatacgcctggtggaaaccttcatcagaatcaaaacatgcctggaagagatccaaattatcaatag

SEQ ID NO: 390 - protein, 391 aa, Solanum lycopersicum
MATRYLTRSLLTTLSRSYTTLSLSTPLPSSFSLLRFRPLIAVAANLRTFTPATLTAATSFRGFATRQTSSSLNDPNPNWSNRPPKETILLDGCDFEHWLVVMEKPEGDPTRDEIIDSYIKTLATIVGSEEEARMKIYSVSTRHYFAFGALVSEELSYKLKELPKVRWVLPDSYLDVKNKDYGGEPFINGQAVPYDPKYHEEWVRNNARANERNRRNDRPRNFDRSRNFERRREMQNPGSSMGGGPPNMRNAPPPNMGEMQQQQQPNMGGMQQQQPNMGGMHQQQQPNMGGMHQPGMGGPPPNYGGGPPRNYGGAPPNNYGGAPNNQYNGGPNNGGGMPYQTGPGPNQNYASGGNHYQNPNMPPPSQNYAPNTPGGNLHQNQNMPGRDPNYQ

SEQ ID NO: 391 - DNA, 759 bp, Triticum aestivum
atggcggctgtaggcgtcacacggcggaggctctcggcgctcctcctctcctcccgtgcgattccccgtcgcctcctcctcctcaccggcgccgccgcctctgcgccctcagcccacccctctccgtgggcgccgccgtcgcgaggggcaaagacggcgctgccgggaaggcccgggtactctccgctcaacgacccgtccccgaactggagcaaccggccacccaaggagaccatcctgctggatggctgcgactacgagcactggctcattgtcatggagttccccgccgaccccaagccctccgaggaagatatggtggccgcctacgtcaagaccctcaccgctgtgctcggaagtgaggaggaggcaaagaagaagatctactcagtatgcactacaacttacacagggtttggtgcgttgatttcggaggagttatcatacaaagttaaaggattgccgggagttctttgggtattacctgattcatatttggatgtgcctaacaaggattatggaggtgatctctttgtagatggcaaagtcattcataggccacaatttcagttcactgagaggcagcaggtaaggagcagacctcgtccccgctatgacaggcgacgagagactatgcaggttgagcgaagagaaactatgcagagaggtccttcagtacaagagcacagacctccgttttctaagcaggttgctcaaaataatgggcagcatgaaatcgtaccgccaggaaggaactaa

SEQ ID NO: 392 - protein, 252 aa, Triticum aestivum
MAAVGVTRRRLSALLLSSRAIPRRLLLLTGAAASAPSAHPSPWAPPSRGAKTALPGRPGYSPLNDPSPNWSNRPPKETILLDGCDYEHWLIVMEFPADPKPSEEDMVAAYVKTLTAVLGSEEEAKKKIYSVCTTTYTGFGALISEELSYKVKGLPGVLWVLPDSYLDVPNKDYGGDLFVDGKVIHRPQFQFTERQQVRSRPRPRYDRRRETMQVERRETMQRGPSVQEHRPPFSKQVAQNNGQHEIVPPGRN

SEQ ID NO: 393 - DNA, 1236 bp, Zea mays
atggcgtcggcgtcgcgtgcgctcctcatctctcgtgcgctccaggccggcgccgtgtctcgccgcgtccccgccctcctgcgccctgtcgctgctgccgcgagcctcctcccagcggtggcggggccggcaggggccgccctcggcgctagggtgcggtgcttcgcgacccagccggcgacgtcctcgctgcgggactcgtccccgaactggagcaatcgcccgcccaaggagacgatcctcctcgacggctgcgacttcgagcactggctcgtcatcatggagccgccgcctggtgacgcctccaaccccgacatcacacgcgacgagatcatcgatagctatatcaagactctcgcccaagtcgtcgggagtgaggaagaagctaggcaaaagatatactctgtatcgactcgtcattactttggctttggtgctcttgtatctgaggaactttcttacaaactgaaagaaattcccaaggtccgctgggttcttcctgattcatacttggatgtcaaaaacaaggactatggaggcgaacccttcataaatgggcaagctgttccttatgatcctaaatatcatgaagagtgggtgagaaacaatgcccgtgccaatgacagaaaccggcgcaatgataggcctcgcaactttgacaggtcaaggaactttgacaggagaagggagaacatgcaaaactaccagaacagagatgggcctcctgcccaaggtttcaatggccccccacctccacctggccagaaccagatgccatcccaccatagtcagggcaacatgtctccgcaaccaccacatgctggtggtggccaaccaaactatcagccccaaatgcaaaacccacagacgggctacaaccctggcggtgctcctcactaccagcaaggtgctgctcctggctaccaaggtggacctccggggtatcaaggtggttaccaagggaacccaggccctgcctaccaaggtggtaacactggttatcaaggtggcaacccaccacctccctaccaaggaagcaacccaccacctccttaccagggaggcagcccaccagggccaccacctccctaccgaggaggcagcccaccagggccaccacctccctaccgaggaggcaaccccaacgtaccgccatattcgggtggtggcaatcctggctaccctggtggcagccctggctaccagggtcaaggaggcaactccaacttccagtga

SEQ ID NO: 394 - protein, 411 aa, Zea mays
MASASRALLISRALQAGAVSRRVPALLRPVAAAASLLPAVAGPAGAALGARVRCFATQPATSSLRDSSPNWSNRPPKETILLDGCDFEHWLVIMEPPPGDASNPDITRDEIIDSYIKTLAQVVGSEEEARQKIYSVSTRHYFGFGALVSEELSYKLKEIPKVRWVLPDSYLDVKNKDYGGEPFINGQAVPYDPKYHEEWVRNNARANDRNRRNDRPRNFDRSRNFDRRRENMQNYQNRDGPPAQGFNGPPPPPGQNQMPSHHSQGNMSPQPPHAGGGQPNYQPQMQNPQTGYNPGGAPHYQQGAAPGYQGGPPGYQGGYQGNPGPAYQGGNTGYQGGNPPPPYQGSNPPPPYQGGSPPGPPPPYRGGSPPGPPPPYRGGNPNVPPYSGGGNPGYPGGSPGYQGQGGNSNFQ

SEQ ID NO: 395 - DNA, 1083 bp, Brassica napus
atggaagcccttgttgttgatgctggttcgaagctcctgaaagcaggagcagcgattcctgaccagtctcctgcaatgataatcccatctcagatgaaacgaatggttgatgatgcgtctgataaccccaccactgtttttgaagacgtcactcttgatcctatcgaaagagggttcattagagactgggacgctatggaggatctgttgcgttacgttgtgtacactgggcttggatgggaagagggaaacgaaggcaacatactcttcacagatccactctgcactcctaaggctattagggagcagttagtgcagttgatgtttgaaacgttcaacgtgtctggattctatgcgtcagagcaagcagtgttgtctctttatgctgttggaagaatctccggttgcactgttgatattggtcatgggaagatagatattgccccagttcttgaaggtgctgtgcagcacattgcctcaaaacggtttgagctcggtggaacggatcttacaaaactattcgcccaagagcttggaaaatccaacccttctgtgaatctcagcatgtctgatgttgaaacattgaaggaacagtatgcaaactgtgctgaggacgaggttgcgtacgagaaaacccaaaactgtgaaatcgagcagcatacacttcctgatggacaggtgataaacattgggagagagagatactctgttggtgaagctttgtttcagccatcaatacttggactggaggagcacggaatagttgaacagcttgtccggattatctcaacagtatcatctgagaaccataggcaactcttggagaacactgtactttgtggtggtacaacctccatgacaggattcgaaggaaggtttcagaaagaagcaagcttgtgctcatctgccattaggccaacgctggtgaaacctcctgaatatatgagtgagaatttgggattgtactcggcttggataggaggagcaatactagccaaggtggtgtttccgcagaatcagcatgttactaaagctgactacgacgagactggaccatctgtggttcacaggaaatgtttctga

SEQ ID NO: 396 - protein, 360 aa, Brassica napus
MEALVVDAGSKLLKAGAAIPDQSPAMIIPSQMKRMVDDASDNPTTVFEDVTLDPIERGFIRDWDAMEDLLRYVVYTGLGWEEGNEGNILFTDPLCTPKAIREQLVQLMFETFNVSGFYASEQAVLSLYAVGRISGCTVDIGHGKIDIAPVLEGAVQHIASKRFELGGTDLTKLFAQELGKSNPSVNLSMSDVETLKEQYANCAEDEVAYEKTQNCEIEQHTLPDGQVINIGRERYSVGEALFQPSILGLEEHGIVEQLVRIISTVSSENHRQLLENTVLCGGTTSMTGFEGRFQKEASLCSSAIRPTLVKPPEYMSENLGLYSAWIGGAILAKVVFPQNQHVTKADYDETGPSVVHRKCF

SEQ ID NO: 397 - DNA, 858 bp, Gossypium hirsutum
atggaggcggcagtggtcgatgctggctccaagctcctcaaggcgggacttgctgtcccagatcaggctccatccttgataatacctactcaaatgaaacgtatgctggaagatggatcatctgttgataattcattgttagaagatgttaccattgatcctgttgtgcgaggatgcgttaaagactgggatgccatggaagatttgttgcaccatgttctatacacgggccttgaatgggaagttggaaatgaaggacaaattttgtttactgaaccgctttgtactcccaaggctgttagagaacgactggtgcaattgctatttgaaacttttaatgtatcgggattttatgcgtcggaacaagcagtattatctctgtatgctgtcgggcgtatctcaggttgtactgttgatattggtcatgggaagatagacatagctgcagtacttgaaggtgctgtccaacacattgcctcaagaagatttgaagttggaggtattgatttgacaaagctacttgctcaagagctgggtaaatcaaatcctatggtgaacctcagcttatctgatgttgagaaactaaaagagcaattctcgtgttgtgctgaagatgaagttgcttatgacagaatgctcagatcatgtgaaacagaggaacatactcttcctgatggacaggtgataagaattggaagggaaagatttactgttggtgaggcattgttccaccatctatattgggctagaagctcatggaattgtgagcagcttgttcgtaatattgcaacggtttcttctgagaaccaaaagcaacggttaaaaataccgttctttggggtgggactacctctatga

SEQ ID NO: 398 - protein, 285 aa, Gossypium hirsutum
MEAAVVDAGSKLLKAGLAVPDQAPSLIIPTQMKRMLEDGSSVDNSLLEDVTIDPVVRGCVKDWDAMEDLLHHVLYTGLEWEVGNEGQILFTEPLCTPKAVRERLVQLLFETFNVSGFYASEQAVLSLYAVGRISGCTVDIGHGKIDIAAVLEGAVQHIASRRFEVGGIDLTKLLAQELGKSNPMVNLSLSDVEKLKEQFSCCAEDEVAYDRMLRSCETEEHTLPDGQVIRIGRERFTVGEALFHHLYWARSSWNCEQLVRNIATVSSENQKQRLKIPFFGVGLPL

SEQ ID NO: 399 - DNA, 1086 bp, Glycine max
atggaagcggcagtggtggacgtcggctctaagctcctcaaagcgggctttgcaattcctgaccagactcctgccatgataattcccactcagatgaagcaattactcgatgatggatccgtcgcagataattcactggctgacaatgtcaccgttgatcccgttgtgcgaggatttattagagattgggatgcaattgaggatttgttgcaccatgttttgtataccggcctcggatgggaaattggcaatgaaggacaaatactatttacagatccactttgtaccccaaaggcgaacaaagaacagttggtgcaactaatgtttgaaacattcaatatatcaggattttatgcctcagaacaagcagtgttatcactctatgctgtgggacgtatctcaggctgcactgttgatattggacatggaaaaatagatattgcaccggtaattgagggtgctgttcaccacatcgcctcgagaagatttgagtttggaggtactgatctaactaatttcctggctcaagaacttggcaagtccaatccacaagtaaatatcagcatgtctgatgtggaaaaaataaaagagttgtactcatgctgtgctgaagatgaattagcttatcagaagaccgaatattcttgtcctgtggagaagcacacccttcctgatggacaggtgatagcaattgggagagaaagatatactgttggggaagctttattccagccatgtctactgggtttagaggctcatggcattgttgatcagcttgtccgtgctatttcaactgtgtcatctgataatcaacgacagctgctggaaaatactgtggtttgtggtggcacttcttctatgacaggttttgaagagagatttcagaaggaatctagcttaagttcatctgctgttcaacctaccctcgttaagcctccagaatacatgccagaaaatttaaccatgtattctgcatgggtgggaggtgccatacttgccaaagtggttttccctcaaaatcagcatataaccaaggcagactatgatgaaaccggaccttccattgttcatcggaaatgcttctga

SEQ ID NO: 400 - protein, 361 aa, Glycine max
MEAAVVDVGSKLLKAGFAIPDQTPAMIIPTQMKQLLDDGSVADNSLADNVTVDPVVRGFIRDWDAIEDLLHHVLYTGLGWEIGNEGQILFTDPLCTPKANKEQLVQLMFETFNISGFYASEQAVLSLYAVGRISGCTVDIGHGKIDIAPVIEGAVHHIASRRFEFGGTDLTNFLAQELGKSNPQVNISMSDVEKIKELYSCCAEDELAYQKTEYSCPVEKHTLPDGQVIAIGRERYTVGEALFQPCLLGLEAHGIVDQLVRAISTVSSDNQRQLLENTVVCGGTSSMTGFEERFQKESSLSSSAVQPTLVKPPEYMPENLTMYSAWVGGAILAKVVFPQNQHITKADYDETGPSIVHRKCF

SEQ ID NO: 401 - DNA, 813 bp, Medicago truncatula
atggaagctgcagtaattgatgccggttccagtctcctcaaagccggatttgctattcccgatcaaactcctgccatgataattcctagtcagatgaaacgaatggttgatgaaacaaatgataatggtaatggtcagttggtggtggatgatgtcgcggttgagccagtggtaagaggttatgttagagattgggatgctatggaggatttgttgaattatgttttgtacagtggacttggatgggaaattggtaatgagggacaaatattgtttacagatccactttgtaccccaaaggctaacaaagaacagttagtgcaacttatgtttgaaacgttcaacatatcagggttttatgcctcggaacaggcagttttatcactctatgccgtgggtaggatctctggatgcacagttgacattggtcatggaaaaatagatattgctccagtaattgagggtgctgttaaccacattgcctcaagaagatttgagtttggaggtactgatctaactaatttcctggctcaagaacttggcaaatccaatccactagtgaatatcagcatatctgatgtcgagaaaataaaacagcaatactcatgttgtgctgaagatgacttagcttatcaaaagacagaagactcttgtcctgtggaaacacatacccttcctgatggacaggtgataacaattggaagagaaagatatacagttggtgaagctttattccagccaagtctattggggttagagactcatgggattgtagagcagcttgtccgtactatttcaacccgtgacatctga

SEQ ID NO: 402 - protein, 270 aa, Medicago truncatula
MEAAVIDAGSSLLKAGFAIPDQTPAMIIPSQMKRMVDETNDNGNGQLVVDDVAVEPVVRGYVRDWDAMEDLLNYVLYSGLGWEIGNEGQILFTDPLCTPKANKEQLVQLMFETFNISGFYASEQAVLSLYAVGRISGCTVDIGHGKIDIAPVIEGAVNHIASRRFEFGGTDLTNFLAQELGKSNPLVNISISDVEKIKQQYSCCAEDDLAYQKTEDSCPVETHTLPDGQVITIGRERYTVGEALFQPSLLGLETHGIVEQLVRTISTRDI

SEQ ID NO: 403 - DNA, 1083 bp, Oryza sativa
atggaggcggtggtcgtcgacgcggggtcgaagctgctcaaggccggcatcgccttgcccgaccagtccccatcgctggtgatgccgtcgaagatgaagttggaggtagaggacggtcagatgggcgacggcgcggtggtggaggaggtggtgcagccggtggtgcgtggcttcgtcaaggactgggacgccatggaggacctgctcaactacgtcctgtacagcaacattgggtgggagattggggatgagggccagatcctcttcacagagccgctcttcacacccaaggcacttcgggagcaactggcgcaacttatgttcgaaaaattcaatgtttcaggcttttatgactctgagcaggctgtattgtcactttatgcagttggacgcatttcgggctgtacagtggacattgggcatgggaaaatcgatattgctccagtttgtgaaggtgctgttcagcacatagcatcaaagagatttgatattggaggaactgacttgacaaacctatttgcggaagaactcaaaaaatctaactcatcggtaaacattgatatttctgatgttgagcggctgaaagagcagtatgcatgctgtgcagaagatcaaatggcctttgaagctataggaagctcatgccgaccagaaaggcacacacttccagatgggcaggttataacaattgaaaaagaacggtacattgttggtgaagctttatttcaaccccacattttgggcttagaagattatggaattgttcatcagctggttacaagcgtctcgaatgtcacaccagagtaccatcgtcagctgcttgaaaacactatgttatgtggtggcactgcatcaatgactggttttgaagacaggttccagagagaagcaaatctgtctgcttcagcaatctgcccatctcttgtaaagcctccagaatatatgcccgagaacctagctaggtactcggcctggctgggcggtgcaatattggccaaggtcgttttcccgcaaaaccagcacgtcaccaagggagactacgacgagactggtccatccatcgttcacaagaagtgcttctga

SEQ ID NO: 404 - protein, 360 aa, Oryza sativa
MEAVVVDAGSKLLKAGIALPDQSPSLVMPSKMKLEVEDGQMGDGAVVEEVVQPVVRGFVKDWDAMEDLLNYVLYSNIGWEIGDEGQILFTEPLFTPKALREQLAQLMFEKFNVSGFYDSEQAVLSLYAVGRISGCTVDIGHGKIDIAPVCEGAVQHIASKRFDIGGTDLTNLFAEELKKSNSSVNIDISDVERLKEQYACCAEDQMAFEAIGSSCRPERHTLPDGQVITIEKERYIVGEALFQPHILGLEDYGIVHQLVTSVSNVTPEYHRQLLENTMLCGGTASMTGFEDRFQREANLSASAICPSLVKPPEYMPENLARYSAWLGGAILAKVVFPQNQHVTKGDYDETGPSIVHKKCF

SEQ ID NO: 405 - DNA, 1089 bp, Physcomitrella patens
atggagccggctgtgctcgactcaggatcgatgtacctgaaggcgggctttgctatccccgaccaagacccgtctataatccttccgacatcaatgacgagggtggaggaggatggggtgcatggtaacgatggcgttattggggacattatacatccaattgagcgaggaataattaaagactgggatgcaatggaagacctgtggcgctatactttctacaccggccttggttgggaacctggcaacgaaggacagcttcttgttgccgaacctttgttgactcctaaggtctcacgcgagagaatggttcagacaatgttcgagactttcaacgttggtggtctttatgcagtggagcaggctgtgctctctctttatgctgtaggccgcattactggtgtcgttattgatgctgggcatggaaagatagatattgctcctgtatgggaaggggccatacagcacaatgctgtgaagcgttttgaaatttctggtcaggatcttaccgatttccttgcgaaagagcttgcacggtcacaacctgatgtgaagttagaccttgccactgtggagatgcttaaggaaaaatatgcggcggttgctgaagactcatcagcttatgtcgcgactgctgaagcctgtcctaagatacaacacacacttcctgatgggcaggttatttctgttggtagagaaagatacgatgtcggcgaagctctgttacggccttctatctttggaatagaagaagatggtctggctgaacagttgcttcgcagcgtatcaacgtgttccccttctgagaatcagcggcagcttattgaaaacatcgttttgtgtggaggcacctctatgataaggggtttggattcacgatttcagaaggaggccgttctagtggcgaatccttcagtgcgaccgtcattgattaagccgcccgagtacatgcctgacaatactttgatcaattctgcatggatgggtggagcaattctcgccaaagttgtctttcctcagaatcagcacatcaccaaagctgagtacgatgaagctggccctccaattgttcaccggaagtgcttttga

SEQ ID NO: 406 - protein, 362 aa, Physcomitrella patens
MEPAVLDSGSMYLKAGFAIPDQDPSIILPTSMTRVEEDGVHGNDGVIGDIIHPIERGIIKDWDAMEDLWRYTFYTGLGWEPGNEGQLLVAEPLLTPKVSRERMVQTMFETFNVGGLYAVEQAVLSLYAVGRITGVVIDAGHGKIDIAPVWEGAIQHNAVKRFEISGQDLTDFLAKELARSQPDVKLDLATVEMLKEKYAAVAEDSSAYVATAEACPKIQHTLPDGQVISVGRERYDVGEALLRPSIFGIEEDGLAEQLLRSVSTCSPSENQRQLIENIVLCGGTSMIRGLDSRFQKEAVLVANPSVRPSLIKPPEYMPDNTLINSAWMGGAILAKVVFPQNQHITKAEYDEAGPPIVHRKCF

SEQ ID NO: 407 - DNA, 1092 bp, Populus trichocarpa
atggaggcggcggtgatagacgctggtactcagctccttaaagccggcaccgcagttccagatcaagctccgcccatgataattccgagccaaatgaaacgaatggtggaagatggaacatcgggtgataataatgaatccgtatttgaggatgtaactgtcgatcctgttgttcgaggttatataagagattgggatgcgatggaagatttgttgcattatgttttatacactagtcttggttgggaagagggaaatgaaggccaagttttgtttaccgatcccctttgcactcccaaggctgttagagaacaattggtacaattgatgtttgagacatttaatgtttctgggttttatgcgtcggagcaagcggtgttgtctctttatgcagttgggcgtatctctggatgcaccgttgatatcggtcatgggaagattgatattgcaccagtacttgaaggtgctgttcagcacattgcttcaagaagatttgaaattggtggtgttgatttgacgaagttacttgcccaagaactgggtaaatctaatcttttggtgaatctcaatgcatctgatgttgagatgttaaaagtaaagtactcctgttgtgctgaagacgagcttgcttacgagaagactcaaaggtcaagtgatacagaggagcatacccttcctgatggacaggtgattagaattagaagagaaaaatatacaattggtgaggcattatttcaaccatctatactgggtatagaggcacttggaatagttgagcagcttgtacgtagtatttcaactgtttcttcagagaaccaccgccaactgctggaaaatactgtactttgtggtggcataacttctatgcctggttttgaagataggtttcagaaagaagcaagcctgtgctcatcagctattcgtccttcacttgtaaagcctccagaatatatgcccgataagttgacagagtactctgcatgggtgggaggtgccatactagccaaagttgtgttccctcagaatcagcatgttaccaagggagattacgatgaaactggaccatccattgtccatcggaaatgcttttga

SEQ ID NO: 408 - protein, 363 aa, Populus trichocarpa
MEAAVIDAGTQLLKAGTAVPDQAPPMIIPSQMKRMVEDGTSGDNNESVFEDVTVDPVVRGYIRDWDAMEDLLHYVLYTSLGWEEGNEGQVLFTDPLCTPKAVREQLVQLMFETFNVSGFYASEQAVLSLYAVGRISGCTVDIGHGKIDIAPVLEGAVQHIASRRFEIGGVDLTKLLAQELGKSNLLVNLNASDVEMLKVKYSCCAEDELAYEKTQRSSDTEEHTLPDGQVIRIRREKYTIGEALFQPSILGIEALGIVEQLVRSISTVSSENHRQLLENTVLCGGITSMPGFEDRFQKEASLCSSAIRPSLVKPPEYMPDKLTEYSAWVGGAILAKVVFPQNQHVTKGDYDETGPSIVHRKCF

SEQ ID NO: 409 - DNA, 741 bp, Solanum lycopersicum
atggaggcagtagtagtggatgctggttctaaatttctcaaagctggtttcgctattccagatcaaactcctgctatggtaataccaacccaaatgaaacgcattgctgaagatgatgaaggttccttgtttgaggaggaggaagtggctgtggatcccattgagaggggtttcgttaaagattgggatgcaatggaagacctgttgcatcatgttctttattctggtcttggttgggaaattggaaatgaaggtcaaattttgttcactgacccgctctgcactcccaaggctattagggaacaattggtgcagttgatgtttgaaacattcaacatctcggggttttatgcctctgagcaggcagtactgtcgctttatgcagttggacgcatatctggctgtactgttgatgttggtcatgggaaaattgatattgcacctgtcattgagggtgctgttcagcacatagcatcaagaaggttggaagttgggggattggatttgacaaagctactagcagatgagcttagtaaatcaaatcccacagtgaaactcaatatttctgatgttgaaaaattgaaagagcagtatgcatgctgtgctgatgatgatattgcctatgagaagcttcaacactcttgcctgcaagagaaacatactctgcctgatggccacggtaatcacaattggaaaagaagatacactgttggagaggcattgtttcaccatctatattag

SEQ ID NO: 410 - protein, 246 aa, Solanum lycopersicum
MEAVVVDAGSKFLKAGFAIPDQTPAMVIPTQMKRIAEDDEGSLFEEEEVAVDPIERGFVKDWDAMEDLLHHVLYSGLGWEIGNEGQILFTDPLCTPKAIREQLVQLMFETFNISGFYASEQAVLSLYAVGRISGCTVDVGHGKIDIAPVIEGAVQHIASRRLEVGGLDLTKLLADELSKSNPTVKLNISDVEKLKEQYACCADDDIAYEKLQHSCLQEKHTLPDGHGNHNWKRRYTVGEALFHHLY

SEQ ID NO: 411 - DNA, 1089 bp, Triticum aestivum
atggaggcggtggtggtcgacgcggggtccaagctgctgaaggccggcatcgcgctgcccgaccaggcccccgggctggtgatgccctcgaagatgaagacggaggtggaggagagcgaggtggccgacggcgcggcggcggtggtggaggaggtggtgcatccggtggtgcgcggcttcgtcaaggactgggacgccatggaggacctgctcacctacgtcctctacaggaacatcggctgggagatgggggacgagggccagatcctcttcaccgagccgctcttcacgcccaaggctctccgggagcaattagtgcaacttatgttcgaaaaattcaatgtatcagggttttatgattctgaacaggctgtattgtccctttatgctgttggtcgcatttcgggttgtacggttgacattggacatgggaaaatagatattgctccagtttgtgaaggtgctgttcagcacgtagcgtcaaagagatttgagattggaggaactgacttgacaaacctatttgcgcaagaactaaagaagtccaacccatcagtaaacattgatatttctgacgttgagaggctgaaagagcagtatgcatgctgcacagaagatcagttagcctttgaagctatagcgagtacatgccagccagaaactcacactcttccagatggacaggttataacaattgaaaaagagcgctatatagttggtgaagctttgtttcaaccaagtatcttgggcttagaagattatggtattgtccaccagctaattactagtgtttcaaacgtcgcatcggagtaccaaaagcaagtgctcgagaacactatgctatgtggtggcactgtatctatgactggtttcgaggacaggtttcagagagaagcgaatctgtcggcttcggcgatccgcccgactcttgtgaaggccccggagtacatgccggaggacctggcgcggcactcggcgtggctgggcggcgcgatcctggccaaggtggtcttcccccagaaccagcacgtgaccaagggcgactacgacgagacgggcccgtccatcgtccacaagaagtgcttctga

SEQ ID NO: 412 - protein, 362 aa, Triticum aestivum
MEAVVVDAGSKLLKAGIALPDQAPGLVMPSKMKTEVEESEVADGAAAVVEEVVHPVVRGFVKDWDAMEDLLTYVLYRNIGWEMGDEGQILFTEPLFTPKALREQLVQLMFEKFNVSGFYDSEQAVLSLYAVGRISGCTVDIGHGKIDIAPVCEGAVQHVASKRFEIGGTDLTNLFAQELKKSNPSVNIDISDVERLKEQYACCTEDQLAFEAIASTCQPETHTLPDGQVITIEKERYIVGEALFQPSILGLEDYGIVHQLITSVSNVASEYQKQVLENTMLCGGTVSMTGFEDRFQREANLSASAIRPTLVKAPEYMPEDLARHSAWLGGAILAKVVFPQNQHVTKGDYDETGPSIVHKKCF

SEQ ID NO: 413 - DNA, 1083 bp, Zea mays
atggaggcggtggtcgtcgacgcgggctctaagctgctcaaggccggcatcgcggcgcccgaccaggcacccccactggtaatgccgtcgaagatgaagctggatgttgaggaccaggagatggctgacggcgcggtggtagaggaggtggtgcaccctgtggtgcgcggcttcgtcaaggactgggacgccatggaggacctactcaactacgtcctgtacagggacattgggtgggagattggggacgagggtcagattctcttcaccgaacccctcttcacgccaaagactcttcgggagcaattggtgcagcttatgtttgaaaagttcaatgtttcaggcttttatgcctctgaacaggctgtattgtcactctatgctgttggacgcatttcaggatgtaccgttgacattggtcacgggaaaatagatattgctccagtttgtgaaggagctgttcaacacatagcttctaagagattagagattgggggagttgacttgacaaacctgtttgcacaagaactgaaaaaatccaacccatcagtaaaccttgatgttgctgatgttgagctgctgaaagagcagtatgcgtgttgcacagaagattatttgacttttgaaagtatagaaagctcttgccaaccagaaaaacacactcttcctgatgggcaggttataacaattgaaaaagaggggtacattgttggtgaagctttatttcaaccacgtatattgggcttggaagattatggtatcgttcaccagctagtcactagtgtctcaaatgtttcatcagagtaccatcgtcagctgcttgaaaataccatgttatgtggtggcacctcatcaatgactggctttgaggacaggttccagagagaagcaaatctgtctgcttcagcaatctgtccatcacttgtgaagcctcctgaatacatgcccgagaacctagcaaggtactcggcctggttgggtggtgcgatattggctaaggtcgttttccctcaaaaccagcatgtgaccaagggcgagtatgatgagacggggccgtccattgtgcacaagaagtgcttttag

SEQ ID NO: 414 - protein, 360 aa, Zea mays
MEAVVVDAGSKLLKAGIAAPDQAPPLVMPSKMKLDVEDQEMADGAVVEEVVHPVVRGFVKDWDAMEDLLNYVLYRDIGWEIGDEGQILFTEPLFTPKTLREQLVQLMFEKFNVSGFYASEQAVLSLYAVGRISGCTVDIGHGKIDIAPVCEGAVQHIASKRLEIGGVDLTNLFAQELKKSNPSVNLDVADVELLKEQYACCTEDYLTFESIESSCQPEKHTLPDGQVITIEKEGYIVGEALFQPRILGLEDYGIVHQLVTSVSNVSSEYHRQLLENTMLCGGTSSMTGFEDRFQREANLSASAICPSLVKPPEYMPENLARYSAWLGGAILAKVVFPQNQHVTKGEYDETGPSIVHKKCF

SEQ ID NO: 415 - DNA, 1593 bp, Brassica napus; identical to SEQ ID NO: 353

SEQ ID NO: 416 - protein, 530 aa, Brassica napus; identical to SEQ ID NO: 354

SEQ ID NO: 417 - DNA, 1596 bp, Glycine max
atgtcgctgaggccgaatgctagaaccgaggttcgccgcaaccgctacaaggtggcggtggacgccgacgagggtcgccggcggagggaggacaacatggttgagatccgcaagagcaagcgcgaagagagcctccagaagaagcgccgcgaaggcctccaagctcagcagcagttccccactcctctccaagcctcctccattgtcgagaaaaagttagagagtcttcctgcgatggtagctggagtgtggtcggatgataacagccagcaattggaagcgaccacgcagttccggaaactgctttcgattgagcgcagtcctccgattgaggaagttattcaagctggggttgtgcctcggtttgtggagtttcttgttagggaggattttcctcaactacagtttgaggctgcgtgggctctcacgaacattgcatctggaacttctgagaataccaaggtggtgattgatcatggggcggtgccgatatttgtcaaactacttagttcgcccagtgatgatgttcgggagcaggcagtatgggcgttgggaaatgttgctggtgactccccaaggtgtcgtgatcttgttcttagtcacggtgccctgatcccattgttggcccagttgaatgagcatgcaaaactttccatgttgagaaacgccacatggaccctttcaaacttctgcaggggcaagccacagcctccatttgagcaggtgagggcagcgcttcctgctctagaacgattggttttttccaatgatgaagaagtcttgacagatgcatgctgggcgctatcatatctttccgatggaacaaatgacaaaatccaagccgttattgaggctggtgtttgtcccagactggtgcagctccttctgcacccatccccttcagtgctgattcctgctcttcgcacagttggaaatattgtgacgggagatgatatgcagactcagactatcatcaatcatggtgcgctcccatgcctcttgagcctgttgacacacaatcataaaaaaagtatcaagaaagaagcatgctggaccatatcaaacattacggctggaaacagagatcagatacaggctgttattgaagctggtctgattgccccccttgtcaatcttcttcaaaatgctgaatttgacataaaaaaagaagctgcttgggcaatctcaaatgctacatctggcggtacccatgagcagatcaagtatttggtgagccagggttgcatcaagcctctctgtgatctgcttgtttgccccgacccaagaattgtcactgtctgtttagaaggtcttgagaatattctgaaggttggggaagctgagaagagcttgggtaatactggagatgtcaacttgtatgctcagatgatagacgaagcagagggattagagaaaattgaaaacctgcagagtcatgacaacaatgaaatatatgaaaaggctgttaaaattcttgagacatactggttggaagacgatgatgagacactacctgcaggcgatggtgctcaacccggttttaattttggaaacaatgatcttccggttccatctggtggattcaactttagttga

SEQ ID NO: 418 - protein, 531 aa, Glycine max
MSLRPNARTEVRRNRYKVAVDADEGRRRREDNMVEIRKSKREESLQKKRREGLQAQQQFPTPLQASSIVEKKLESLPAMVAGVWSDDNSQQLEATTQFRKLLSIERSPPIEEVIQAGVVPRFVEFLVREDFPQLQFEAAWALTNIASGTSENTKVVIDHGAVPIFVKLLSSPSDDVREQAVWALGNVAGDSPRCRDLVLSHGALIPLLAQLNEHAKLSMLRNATWTLSNFCRGKPQPPFEQVRAALPALERLVFSNDEEVLTDACWALSYLSDGTNDKIQAVIEAGVCPRLVQLLLHPSPSVLIPALRTVGNIVTGDDMQTQTIINHGALPCLLSLLTHNHKKSIKKEACWTISNITAGNRDQIQAVIEAGLIAPLVNLLQNAEFDIKKEAAWAISNATSGGTHEQIKYLVSQGCIKPLCDLLVCPDPRIVTVCLEGLENILKVGEAEKSLGNTGDVNLYAQMIDEAEGLEKIENLQSHDNNEIYEKAVKILETYWLEDDDETLPAGDGAQPGFNFGNNDLPVPSGGFNFS

SEQ ID NO: 419 - DNA, 957 bp, Gossypium hirsutum; identical to SEQ ID NO: 355
  misc_feature (653)..(653): n is a, c, g, or t
  misc_feature (737)..(737): n is a, c, g, or t

SEQ ID NO: 420 - protein, 318 aa, Gossypium hirsutum; identical to SEQ ID NO: 356
  misc_feature (218)..(218): Xaa can be any naturally occurring amino acid
  misc_feature (246)..(246): Xaa can be any naturally occurring amino acid

SEQ ID NO: 421 - DNA, 1575 bp, Hordeum vulgare; identical to SEQ ID NO: 235

SEQ ID NO: 422 - protein, 524 aa, Hordeum vulgare; identical to SEQ ID NO: 236

SEQ ID NO: 423 - DNA, 1686 bp, Medicago truncatula; identical to SEQ ID NO: 237

SEQ ID NO: 424 - protein, 561 aa, Medicago truncatula; identical to SEQ ID NO: 238

SEQ ID NO: 425 - DNA, 1581 bp, Oryza sativa; identical to SEQ ID NO: 363

SEQ ID NO: 426 - protein, 526 aa, Oryza sativa; identical to SEQ ID NO: 364

SEQ ID NO: 427 - DNA, 1599 bp, Physcomitrella patens; identical to SEQ ID NO: 365

SEQ ID NO: 428 - protein, 532 aa, Physcomitrella patens; identical to SEQ ID NO: 366

SEQ ID NO: 429 - DNA, 1590 bp, Populus trichocarpa; identical to SEQ ID NO: 367

SEQ ID NO: 430 - protein, 529 aa, Populus trichocarpa; identical to SEQ ID NO: 368

SEQ ID NO: 431 - DNA, 1590 bp, Solanum lycopersicum; identical to SEQ ID NO: 245

SEQ ID NO: 432 - protein, 529 aa, Solanum lycopersicum; identical to SEQ ID NO: 246

SEQ ID NO: 433 - DNA, 978 bp, Triticum aestivum; identical to SEQ ID NO: 371
  misc_feature (885)..(885): n is a, c, g, or t

SEQ ID NO: 434 - protein, 325 aa, Triticum aestivum; identical to SEQ ID NO: 372

SEQ ID NO: 435 - DNA, 963 bp, Zea mays
atgtcgctgcgtccgagcgagcgggtcgaggtacggcggaaccgctacaaggtggcggttgacgcggaggaggggcggcggcggcgcgaggacaatatggtggagatccgcaagagccgccgtgaggagagcctcctcaagaggcgccgtgaggggctccaggcccaggtccctgcccctccctccggggtcgagaagaagcttgaaagcctcccagctatggttagtggggtttattcggatgataataaccttcagcttgaggccaccacacagttccgcaaattgctctctatagagaggagtccccccatcgaagaagttatcaaaacaggtgtagttccaagatttgtgcagtctctcaccagagaggatttcccccagctgcagtttgaagctgcatgggctctcacaaatattgcttctggcacttcagaaaatacaaaggttgttattgatcatggagctgttcctatatttgtgaagcttcttgggtctggtagtgatgatgttcgtgagcaggctgtgtgggctttgggtaatgttgctggcgattctccgaagtgccgcgaccttgttcttgccaatggtgcgttgatgcctctgctagcccagttgaatgagcatgctaagctctccatgctgcggaatgccacctggactttgtctaacttctgcaggggaaaaccacagccatcatttgatcagactaagcctgctctgccagcacttgcacgacttatccattccaacgacgaggaagttctcactgatgcatgctgggccctgtcatacttatctgacggcactaatgataagatccaggctgtgattgaagctggtgtttgcccccggcttgtggagctcctcctccatccatcaccatcggtgcttatacctgctctacgaactgttgggaacattgtaactggagatgatcagcaaactcaggtggggctttaa

SEQ ID NO: 436 - protein, 320 aa, Zea mays
MSLRPSERVEVRRNRYKVAVDAEEGRRRREDNMVEIRKSRREESLLKRRREGLQAQVPAPPSGVEKKLESLPAMVSGVYSDDNNLQLEATTQFRKLLSIERSPPIEEVIKTGVVPRFVQSLTREDFPQLQFEAAWALTNIASGTSENTKVVIDHGAVPIFVKLLGSGSDDVREQAVWALGNVAGDSPKCRDLVLANGALMPLLAQLNEHAKLSMLRNATWTLSNFCRGKPQPSFDQTKPALPALARLIHSNDEEVLTDACWALSYLSDGTNDKIQAVIEAGVCPRLVELLLHPSPSVLIPALRTVGNIVTGDDQQTQVGL

SEQ ID NO: 437 - DNA, 246 bp, Brassica napus
atggattatgatgacagtgactttcaaaaccacaatctccatttagctggtgaagctaacactaagtttcctccggtgtctcttccaaggtttgattttgacgagaggtttgatagtttagtcgaaactgagggttttcttggtattgagggtaacgaagatagtaactggattgaggatttctctcgtggaagtagtggtgtaggtgttaagctcagctgcaacagagtcttgtgccatttctag

SEQ ID NO: 438 - protein, 81 aa, Brassica napus
MDYDDSDFQNHNLHLAGEANTKFPPVSLPRFDFDERFDSLVETEGFLGIEGNEDSNWIEDFSRGSSGVGVKLSCNRVLCHF

SEQ ID NO: 439 - DNA, 2418 bp, Glycine max
atgattgtacgattggggaatagggattcacccatggattatgatgacaatgattttcaaaaccagaatctccatttagctggtgaagggagtgccaaatttcctccagtattaaggccatatgctctcccgaagtttgattttgatgaaagccttcaagcaaatttaagatttgatagtttagtagaaactgaagtttttcttggcattgaaagtaacgaagataaccagtggattgacgcattctcccgagggggtagtggcatagagttcagttcaactgcagccgagtcttgctctatatcaaggcatggcaatgtttggtctgaggcaacttcctcagaatctgttgaaatgcttttaaaatctgttgggcaggaggactatattcctagacaaacagttattcaggaatcagatgcctgtgatgaactggcctgcttagctaagcaaatggacaccaatccaaaatttgatgataaaaatgaatttagaagtagtgtttcagatttacatccacctggtggtatccatactggtttttctggattgaaagaggatgtaggaatggagaagcctcatggtggagtctcccaaggtcatgaaggggaatcatccattgatggaacttcaagtaaccccaaactaagtgatatctgcagaaatattgacttgcctgtgtctgaggggagtctgactcttgataccaatgacaaaaataacaatacaaaccaaagagaagttgagactgttgatgatgactcacatcatggcaaaactcaagatgattcatctgcagtgcaaactaatattgctgaatcatctataaaaaatatgggtgatgacaagagagatcctttacaagcacaaacttataatcaagatttggaatcttctctgatggataaagaagctgttgtggacacacaaactctggatcgagacatggttgggagtgatgcacatcatctggataaacccctttgttcaatccccacagaagaaaatttggaagggggtgtagttgaaggtcttgagactgggttaagtagtttagagggttccttaacaatggaatctgttgctgcttctggctcgccgaaagttgaaaaaaccagtgaagatatgtgtttcagtgctctgtctcagaacaatgtaagtgaagatgtaatgttgcttaacgatgtggaaatggatgaccagtctgcaccaaatacatgtgtattgccaaaatcttcaagtaaagatgattctatctcggaggggcaagcagttgaggttagtaatttaaattgtgaaaattgtccaaatatgcaccagaatgtggatgtcatagagaagacgacacatggcggcagcagtgttactaaggaagatgagctattgaacactggtgatcatgtggatacagtgattttgtcaagcaagtcagagacatctatgcctactgcagaagaaagtaacatttccactattaatgaaggaaatagtgacaatatggtaggaagtttttcaagtagcagtgcgacggccttttcaacaaaatcttccattttgggtgagtctactcaaatatgtgtaaacaatgaacctgacagacagaatgaccatgaaaaatgtgatctagatgtctctgtcaatgatcaggatgaactaatgaacactggtgatcatgtggatacagttatattgtcgaacaagtcagaggcatctatatttacttctgaggaaaataacatttcctccatccgtgaaggaaacagtggcaaaaaggtagaaggttttcctagtggcagtgtgaaggatttttcaacaaaatcttccattttgggcaagtctactcaaatatgtgcaaacaatgaatctgacagacagaatgaccaggaaaaatgcgatcaagttgtctctgtcaatgatcaggagcatgaaaaggttccttctgattctagccagaagcattgtgatgtcgataagggtgttgtttcatcatctattagtgaaggtagcatggaaatcaagttgatggattatgatgacaatgattttcaaaaccagaatctccatttagctggtgaagggagcgccaaatttcctccggtattaaggccatatgctctccccaagtttgattttgatgaaagccttcaagcgaatttaagatttgatagtttagtagaaactgaagtttttcttggcattgaaagtaacgaagataaccagtggattgacactttctcccgagggggtagtggcatagagttcagttcaactgcagctgagtcttgctctatatcaaggcatggcaatgtttggtctgaggctacttcctcagaatctgttgaaatgcttttgaaatctgttggacaggaggactatattcctagacaaacagttattcaggaatcaagatgcctgtga

SEQ ID NO: 440 - protein, 131 aa, Glycine max
MDYDDNDFQNQNLHLAGEGSAKFPPVLRPYALPKFDFDESLQANLRFDSLVETEVFLGIESNEDNQWIDTFSRGGSGIEFSSTAAESCSISRHGNVWSEATSSESVEMLLKSVGQEDYIPRQTVIQESRCL

SEQ ID NO: 441 - DNA, 4911 bp, Medicago truncatula
atggattatgatgacaatgattttcaaagccagaatcttcatttagccggtgaagggagtaacaaatttcctccagtattaaggcaataccccaagtttgattttgatgaaagccttcagggtcatttaaggtttgatagtttggttgatactgaagttttccttggcattgaaagcaacgaagataatcagtggattgacgcatactcccgggtaagtagtggcacagagttcaattcaactgcagctgaaacttgctctacgtcaaggcataataatgtttggtctgaggcgacttcctcggaatctgttgaaatgttattaaaatctgttgggcaggaggacattatccccaaagaagctattgttatagaagagtcagatgcctgtgatgaattagccaagcaaatggatcccaatcaaaaacctgatgagaaaattgagtttaaagataacattactgatacacagccacccagttgtattcatgaaagcttgtccagatcaaaagaggatgtagaaatggagcagtctctggccggagtttcccaaggccgtgaaggtgaatcatccatagatggaagtttaaataatatgaaaccacctgatatgcatcgcaatattgacttgcctgagtctggggggattctctttgatacaaaccaaaggaaagttgaagttccagctgatggttctgtacatgaaaaaactaacgataactcatctgcttccgtggcgatgactaatacgaatgaagcttctacagaaaatatctctacctgtgaagtcttaaaaattcaaaatgtgcaaaatcaaatagttggcctgggtgacgacgaccaaagttctttacaaacacaaattagtaagcaggatttggagtcttccgtgaacatcaaagattttaatgctggcactcaaactttagatgtaaatacagttgagggtgaagcaaatcattctgataacccacctcgtttaatccatacggaacaagctttggaaggtgagagtgtagttgaaggccttgcgactgggataaatactttagagaaatccttgaacaccgtatctaatggtatttctaacctgcagaaaacagaaagaggaagtgaagatgcatgttttagagatttatcccagggaaatgcaaatatagattcattattggttaaagatcctgcggtggataaccaatctacaccaaatacaagcaacatgccaatgattgcaataaacgataattccagttctgaggggaaagatgcatgttttagagatttatcccaaggaaatgctaataacgatgctctattgattaaaggtcctctgacggatgatcaatctgcactaaatacaagtggcattccaaagattgccatactagatgattctagttctgaggtgcataaagttgaggtcagtaattctgattgtggaacttgtcctaattatcagccgaatacggtgatgattgagaagacatttggtgagagcagtgtttgtaaggagaaggagttggtaaacattggtaaccagatggatacagaggatttgttaggtaagtcagaggcatctatgcttgctgtggtggacaaaaacacttctatagccagtgaaggaaatagtgataacagagcaagttttttcactttcaatacaatggtttctacagagtctcacattttgggcgagaccactcaagtatgtgaaaataacaaatctgacgagcataaagatttttgtcaagacatttttgtcattgaccaagggcgtgaaaaggctccttttgattcgagcacaattccttgtgatgttgatcaattccatcttgctgacaagagagtttgttcatcatctcttggtgcaggtagtgttgaaacctccacagtatcggtcgatgtcacgccggtcaacagttcagatcaccatgagcttgaaaggatgaagcatgttgagcctgcttctgttgatgaaaaggaagactttgaagccaaagtagatgaagaagcaggtgattcttttcctgttgggtcttctgaactggaagttgatccctgtcctgttgctggaactaaaagtaaaaaaaattccgataatctggataatctgcatattactgctactaaaaagattggtgaacctcaagaaagacaaagtagtgaggttgatcacgagtgcacaaaagattctagtatggctactgatctatgtgaatcactagagaaacagggtgatgaagttactgtttgttttattaaggatgataaggaggcaatgtctgacactagggattcacccatggattatgatgatagtgattttgaaagccagaatcttcatttagctgctgaagggaacaccaaatttcctccagtatatgctctccctaagtttgattttgacgaaagccttcaatcaaatttaagatttgatagtttggttgagactgaagtttttcttggcattgaaagtaacgaagataaccagtggattgacgacacattttcccgtgcgggtagtaacatagagttcaattcaactgctgctggatcttgctctatatcaaggtatggcaatgtgtggtccgaggctgcttcctcagagtctgttgaaatgctcttaaaatctgttggacagggggagtatattcctaggcaaactcgggaatcgggtgcttgtgatgaactggcctgcttagctaagcaaatggactccaattctaaacccgatgatagaaatgaatttaataataatgttacaaatttacagccaccttttgatacacatacaagtttttctggattgaagaaacatgtaggaatggagcagtctcagacaggaatttcccaaagtcatgatggtgaattttccttcgatggaagttcaggtattccggaaccaaatgacatgttccgaaatattgacttacctatggctgagggtagtccaactctctttacaaatgataaaagtaacattactaaccaaagagaagttgagactgtggctgatgtctcagatcatggtgaaactcacgattcatcagcacttgtggtggaaactaatattactgaatcatctctgcaaaacattgacctgcctatgtctgagggtagtccaactatctttaccaatgataaaagtaacattagtaaccaaagcgaagttgagactgtggctgatatctcgggtcatggtgaagctcatgattcgtcagcactagtggcggaagctaatattactgaatcatctgtgcaaaatatggttgatgagcaacaaggttcacaacaagcacaaactaataatcaaaatgtggaatcttctatgatgaaggaggaagctgttgtagacacacagactctggatcaaaatgcagctagtgttgatgcacatcatccggataaatctctttttccaacacccccacaagactctttagaaggagggagtttagcgaaaggaccggagaccgggttaagtagtttagaggattccatgggaataagaaccgttgcagtttctgacatgcagaaagaagaaagatgcagtgaagacatatgttcccgtgatctgtctcaggaaaatccaagtgaaaacttagttttgcttaaagatgcggaaatggaggatcagtccgtaccagatacttgcatatcaccaaaggtttcagttaaagatgattctttctctgccgggcaggtgattgaggatagcaagtccagtcatggaatttgtcccaatctccagcaaactgtggatgtcattgagaacaaaacttacagtgcaagcaatgttcttaaggaaaatatttcattaaacactggtgaccacatggattcagggattttatctagcaagttggagtcatctatgtttcctgcagaggaaaatagcatttctattgttagtgaaggaaataatgacaacagggttggaggtttttccagtttcagtttggtggcttcttcaagaaactcttccattgtgggtgaatcgactcaaacatgtgtaaacaatgaacctgataggcaaagtgacccagaaaaatttgaccaagatgtttctgtcaatgatgaaaagaatacaaagattctttctgattctagccaaatgcattttgatgttgcccaatcccatcttggtgataagggagttgtttcatcgcctcttagtgcaggtagcatggaatctgagttgacaacttccactgtatcaatcaacgtcaaacctgcctataattcagcatcgcaaattatttcagaaaatactagtttgacatcctgtgagatgatgaatgatccacctcctagtgaagttgtttcaattcatcgagcgactggtgacaacgatattcaaagggtaactaccgttgaatcaccttctgccgagggaaaagaagaaattgaaatgacaataacagagaaagctggaatatcggctcttgttgggtcttctgaacaggaaactgctccttctcctgttaaggaaacagaaaaacttcatccttctggtactactggacatttgaaatgtgacttgacagtaacagaggaagctggaatatcggctcttgttgggtcttctgaacaggaaactgctccgtgtcctgttaaggaagcagaaaaacttcatccttctggtactaccggacattttatatgtgacatagcaagtgacagtaggcctgatgttgcgactcatggtgctgcaaaaattggggaaccgcaaagaacaacaaatgagaaggttaccgaggaatgcacaaaagatattagtatgcctccagttctatgtgaatcatcagagaaacagggtgacggtgtcataatttctgttattaagaatgataaggagactttacaagaggttcatgaaaagtcgtcctcgaaagaattaggtaaccactaa

SEQ ID NO: 442 - protein, 877 aa, Medicago truncatula
MSDTRDSPMDYDDSDFESQNLHLAAEGNTKFPPVYALPKFDFDESLQSNLRFDSLVETEVFLGIESNEDNQWIDDTFSRAGSNIEFNSTAAGSCSISRYGNVWSEAASSESVEMLLKSVGQGEYIPRQTRESGACDELACLAKQMDSNSKPDDRNEFNNNVTNLQPPFDTHTSFSGLKKHVGMEQSQTGISQSHDGEFSFDGSSGIPEPNDMFRNIDLPMAEGSPTLFTNDKSNITNQREVETVADVSDHGETHDSSALVVETNITESSLQNIDLPMSEGSPTIFTNDKSNISNQSEVETVADISGHGEAHDSSALVAEANITESSVQNMVDEQQGSQQAQTNNQNVESSMMKEEAVVDTQTLDQNAASVDAHHPDKSLFPTPPQDSLEGGSLAKGPETGLSSLEDSMGIRTVAVSDMQKEERCSEDICSRDLSQENPSENLVLLKDAEMEDQSVPDTCISPKVSVKDDSFSAGQVIEDSKSSHGICPNLQQTVDVIENKTYSASNVLKENISLNTGDHMDSGILSSKLESSMFPAEENSISIVSEGNNDNRVGGFSSFSLVASSRNSSIVGESTQTCVNNEPDRQSDPEKFDQDVSVNDEKNTKILSDSSQMHFDVAQSHLGDKGVVSSPLSAGSMESELTTSTVSINVKPAYNSASQIISENTSLTSCEMMNDPPPSEVVSIHRATGDNDIQRVTTVESPSAEGKEEIEMTITEKAGISALVGSSEQETAPSPVKETEKLHPSGTTGHLKCDLTVTEEAGISALVGSSEQETAPCPVKEAEKLHPSGTTGHFICDIASDSRPDVATHGAAKIGEPQRTTNEKVTEECTKDISMPPVLCESSEKQGDGVIISVIKNDKETLQEVHEKSSSKELGNH

SEQ ID NO: 443 - DNA, 5052 bp, Oryza sativa
atggattatgatgattctgattttcagagccagaatttccagttagctggtgaagacaacaataaattcccagcaggtctgcggcaatttccactgcccaaacttgacatcgacgaccaactacaaagccacctcagatttgataacctaattgattcagagggactttttagcggacaaggtcacggcaacagttggattgaggttttgtccactggaagtagtgttgttgattttagttctagtgctgctgaatcttgctctataaataggacaaataatgtatggtctgaggcaacatccactgaatctgtggaaatgttattgaagtcagtgggtgaaaatgagatgaccggtaacatggatgagaacgcacatcatcagattagtggaatggacagtaaaactgatccatccaacatgccgtccaaaacaagtgattctcccacaggcaacattatagtaccagctgagaatgataagtctcagagcactcgttcggaaatggcagaagatccttcaaggattcagcctcagcttgagcatatcagacctttctcagtggatgacaaagctgaacaagcagtaggttcaactttatcagacagaaaatctaactatacgctggaatctgtttctgagaggtgcatagtgagtgggaggtcttcttctccaaagaaaacatcagaaagctgtccagatgttggcagctattttgaggtggtccatgatgacgattctttggacaacctcaacatacagtcagatggagtaggttctagaaagttgaataatgaacccttctcagacttggcaccattacagaacatttatactaccagctcatatcactttgagcaggacaatcaagaatcaggagttggtgttaccactcaaggttcagaaatatgccacacgaatgaaaataaagatggacttcatgatttgcaaaatttgtcatgtacaagccagcatttgggttcttcaaacttaactagtgaagttagcaatgaaactttattgtcgggaagttctgatggattactggaggccatcacaaatccagtaaagatgctgcacaggagtgatgacactagtaagagagccagtgctacactgcaatcatctttcttacaagtcgagcatgcatcagaaggcacaaaaggttctattgacaggagcagtgagcccgccatgaagaaatttggtgctagtgaagaacccaattctgctaaatctcaaggtgagccagatttgaaaaattctagtcctcatcttgtcattcctttgccaaccataagtggtgagtttattcagtctccaaaaggaaaacagcttgctcatgttgctggagtttctgaagaaaccaaatatgacagggtggatgatacgaaccatagcactagtgatgactcaaaacttgccatgttggagcagcttcaagattctgttgataatctatctagtggtgttatggaagagaagacaatcagagggcaaatctcagctgtttcagggaacgttgtacatgtagtgaaaagtggtcattgtgaaaaagttgcagtttctaccagtacaacagatgataagtttgagtcaccgggtgatattgtgcctgacaattcttcagcttgtttacctgatgaaaaagacccaagcatcacagttaaccacgaggtgtcattcaaggaaggtgttgtgcctgcattagaagacgatcctgagaaaatgtcctcaatgaatcatgaggagccattgaaggaagatgataaatctactttagaagttggagaacacaataccacatctcctgtttctgagcccttgctgatgggatcaacaggatcagtgaatccgaacattgatactatttgtagcagtggtactgatgctgttgcagaaacaccacaatgcgaagaacaggccacttcttcgggtagtttgaccacaaatgcaactcaggataaactaggtgatcatccagacgcttgtccaccgaaagtcttgactactgggcctttgatgcaacctgaggatcatgaagatttagttgcaccatcctctgtcttgggtgcctcgtctgaaaagggtgaacaaaataacggaaaagttcccttgaatgggatggatgattcgggtgtgcagttacaagataaggtattaagtcatggtggagatcgtactcttgttactgtttcatcagagaataagaatggcttagaacatgggactggtgaaggaagctgcactgatgctacatgtggttcgcctacagtgattagttgcaatgaatcctgtccagaagaagatgggcagggcagtaatgctttgcttcatcacaaacaaaccgaaccacccaaggatcctaaagatcatacagcttcgactaacaattcccatgtctcaaaagaaggttcttccagaaatgtaaaacctactcttacttcggaggagacgcatacagccgaagataaaagtttttcatttgaggttggagctccactaaatataactgagaaagctcatgctcctgcttggagcccattgcctcgacctgaagttgctcagagtcccgaggtaaccactggaattcctaaacctggaaatccatcgaatcatggtagtgatgaaagtaagaatttggcgattgtggagaccagcaaagaacaactatctggaaggaaagtggttggaagtgctgaggggtcttctgtaagctcacatattggtcatatcactaaagccaaaagtacaccactagagcaggaacaacaacatccaactcctgatgtcaatgctttggggcaccaacctttcacagatttacagcatgtgcagctacgtgcacagatatttgtttatggagctctcattcaaggaatgccaccggcagaatcttacatggtgtcagcttttggagaacctgcatgtggtcgtaagcctccatgggggacacttttgcaagctgctttggaaagatataatagtcagaggtcatctttaactggcttggagactcctacaagctcacatataggtagccgtgtgacggaaaaagccagtagaagcacagcggttaaaactgcaccagctagcaaaaagggtggcaaaactgtgttgccagcacatactgctgtgccccttcatttgccaactttaaatatgtctcctcttggtagttctgctttgagcttgccacgaggtactcatctggattttggccaggctgtatcaccagtattcccatacagttcacagacaaggcagcctacttctggtgttgcatcgtggtttccccagagccctggtgggcgcgctgccccctggttggttcaaccacagaatttgatatttgattcatcgatgaaaccgcctgtgccggcaagtgcaaatgaaactgcaaagggagcatcctctaaaaacatatccatttcacaagctgtttcacctgttgcattccctccgaatcaggcgccttctaccatttctccattagcagtcatacctgaggaaaaacagaaggcatcggtttctacttctaagcgtggagctacaccacaaaagtcaagaaaaagaaagaaagctccagcaagtccagaacaacctatcattgcccctctgctcaaaacagatattgcatctgttactcctgccactcagcatacaccaggcttcaccttatccactcattctccaagcaatattttggccagtgggcttgtttctaacacaggcttggtcacccctgtgcctaattatcagattactggtatcaaggatgcagagcaaagaatcttttcagaacagatctctggtgcaatagagcaatcaatgggacaagcaaaaggggcaggtgtgcatgcgatggatgcagttaggcatgctgaaggtatttggagccacttatcaacaaattcgaaaggcaaattacctgcagaagtagaagagaagcttacttcagctgctgctgctgcttctgcagcagtttctgttgcaaaggcagctgctgaagctgctaagatggcctcagaggctgcattgcaggcaaaaatgatggcagaggaagtcctttcttctacctatgcaaattcctctcagaagcatgatgctggtgaatttaaagtcagtaacaacctggctagtttctcaagtttgacacccacatcgtcttggaaaacaaaggatgacatttccaagggttccattatttcagtggcacgggaggttgctagaaagagggttgaagaggcagcagcagctgcaaaacgtgcagaaaacttggatgccattctgaaagctgcagaacttgctgcagaggctgtgttcaaagcaggaaccatcattggtatgggtgaacctttaccttttacccttagtgagctgttggaagctggtcctgatggttactggaaatctgatcaagtgaggaataagaaggctacaaaattggaactacctactgattttagtaaatctggaaggaagcgtggtggcaaagctaaacatgaccatgcaatacagaacttagagccatcttctagtggcaaagggttgcagctagatgtagtgcattcagggaacgtggctgaagatgttcccaccattgctccagtcaatgggaacagaaatgatgcagcaccgaacataatctggaatggcattgaaaagggatctgctgttgaggttttagttcacaagggtgagtctggagtagcttggttttctgccaaagttcttgatataaacaatgatagtgcatgtatcagctacgactctcacactgaagaaactggtcttcgcaaagaatgggtgccattgagacaggaaggggagaaggcacctcaaatccgccttgctcatcctgcaactgtttctagatttaaaggaactaggaagcgccgtagggacacatcaggaaattactcttgggctattggtgatcatgtggacgtattgattgaagatagttggcgagagggaattatttctcgcaaccgtgatggtgatgaaacaaagcttaccgtacaattttcaggtatcatagtaatgtga

SEQ ID NO: 444 - protein, 1683 aa, Oryza sativa
MDYDDSDFQSQNFQLAGEDNNKFPAGLRQFPLPKLDIDDQLQSHLRFDNLIDSEGLFSGQGHGNSWIEVLSTGSSVVDFSSSAAESCSINRTNNVWSEATSTESVEMLLKSVGENEMTGNMDENAHHQISGMDSKTDPSNMPSKTSDSPTGNIIVPAENDKSQSTRSEMAEDPSRIQPQLEHIRPFSVDDKAEQAVGSTLSDRKSNYTLESVSERCIVSGRSSSPKKTSESCPDVGSYFEVVHDDDSLDNLNIQSDGVGSRKLNNEPFSDLAPLQNIYTTSSYHFEQDNQESGVGVTTQGSEICHTNENKDGLHDLQNLSCTSQHLGSSNLTSEVSNETLLSGSSDGLLEAITNPVKMLHRSDDTSKRASATLQSSFLQVEHASEGTKGSIDRSSEPAMKKFGASEEPNSAKSQGEPDLKNSSPHLVIPLPTISGEFIQSPKGKQLAHVAGVSEETKYDRVDDTNHSTSDDSKLAMLEQLQDSVDNLSSGVMEEKTIRGQISAVSGNVVHVVKSGHCEKVAVSTSTTDDKFESPGDIVPDNSSACLPDEKDPSITVNHEVSFKEGVVPALEDDPEKMSSMNHEEPLKEDDKSTLEVGEHNTTSPVSEPLLMGSTGSVNPNIDTICSSGTDAVAETPQCEEQATSSGSLTTNATQDKLGDHPDACPPKVLTTGPLMQPEDHEDLVAPSSVLGASSEKGEQNNGKVPLNGMDDSGVQLQDKVLSHGGDRTLVTVSSENKNGLEHGTGEGSCTDATCGSPTVISCNESCPEEDGQGSNALLHHKQTEPPKDPKDHTASTNNSHVSKEGSSRNVKPTLTSEETHTAEDKSFSFEVGAPLNITEKAHAPAWSPLPRPEVAQSPEVTTGIPKPGNPSNHGSDESKNLAIVETSKEQLSGRKVVGSAEGSSVSSHIGHITKAKSTPLEQEQQHPTPDVNALGHQPFTDLQHVQLRAQIFVYGALIQGMPPAESYMVSAFGEPACGRKPPWGTLLQAALERYNSQRSSLTGLETPTSSHIGSRVTEKASRSTAVKTAPASKKGGKTVLPAHTAVPLHLPTLNMSPLGSSALSLPRGTHLDFGQAVSPVFPYSSQTRQPTSGVASWFPQSPGGRAAPWLVQPQNLIFDSSMKPPVPASANETAKGASSKNISISQAVSPVAFPPNQAPSTISPLAVIPEEKQKASVSTSKRGATPQKSRKRKKAPASPEQPIIAPLLKTDIASVTPATQHTPGFTLSTHSPSNILASGLVSNTGLVTPVPNYQITGIKDAEQRIFSEQISGAIEQSMGQAKGAGVHAMDAVRHAEGIWSHLSTNSKGKLPAEVEEKLTSAAAAASAAVSVAKAAAEAAKMASEAALQAKMMAEEVLSSTYANSSQKHDAGEFKVSNNLASFSSLTPTSSWKTKDDISKGSIISVAREVARKRVEEAAAAAKRAENLDAILKAAELAAEAVFKAGTIIGMGEPLPFTLSELLEAGPDGYWKSDQVRNKKATKLELPTDFSKSGRKRGGKAKHDHAIQNLEPSSSGKGLQLDVVHSGNVAEDVPTIAPVNGNRNDAAPNIIWNGIEKGSAVEVLVHKGESGVAWFSAKVLDINNDSACISYDSHTEETGLRKEWVPLRQEGEKAPQIRLAHPATVSRFKGTRKRRRDTSGNYSWAIGDHVDVLIEDSWREGIISRNRDGDETKLTVQFSGIIVM

SEQ ID NO: 445 - DNA, 5157 bp, Populus trichocarpa
atggattatgatgaaaatgattttcaaaaccacaatcttcatttagctggtgaaggaagcaacaaatttccttctgttttacagccatatgctcttcccaagtttgatttcgatgacagtcttaatggatctttaaggtttgatagtttggttgagactgaggtttttcttggcatcgaaagtaacgaggacaaccagtggattgaagatttctctcgtggtaccagtgggatacagtttagttcaagtgcagcagagtcttgttctctatcaagacgcaacaatgtctggtctgaagctacttcctcagaatctgttgaaatgttattgaaatctgttggccaggaagataatactcctatacaaactaatactaaggagtcagatgcctgtgatgaactgggttgcatactaaagcacatggagcccatcttgaaacaggataatgatacatcacctaaagtggaagatactgcgaatttacaggctacatttctgccaggcgaggatgtggaagatttttctgtgttggataatgatgttggacagcagcagcctcttgatgatagttctcaggatcataaaggtgaagcatctgctgatagtggtttgggacctttagttgacccatctgctgttagtgtagaggtcaggcaacctgttattgaagggagtctgtccattgatagtaaatctaatcatgttactcaaagggaaatcgataatgtcgtgaatggatcttcaaatgataggccacagaaagttcctgcttcagggatgcaggatggtgcctctgtgcaaaatatcactacaggaaatattgaattgaatgaaaaagatggccctgatgatataaataacacttctgatgatagtaaagattttctggaaacagacactggtgagaatcagaaaaagggacaagtattaagtcaagagggccaaatggaggatgagaatccttgttcagatgcagtggaatctatggaagaagcaaacgtcattgaaactaattcgagtaatttgggggaaccttcttgcaaaatactgaaggggcattctggtttcccagaagacgtagtgactagtgatcagtccgaagtggatacagttgggggatcagtgatggctgttgaaggtaatactacttttaagagggatgaaattgaggactcaaatggttcccaattggataacaagaacctatctaataagtgtgagggatctctcctgtctgctgaagactgtgagcctgctaaagtgaaagttggtggaactagcagcagcgatacaggtggtgtttctagtttggctacagtgtgctgttcagctgaagttgttggagaagtggcccatgtttcatcctctttccttgttgaatcatcacaaatatgtgggaagtctatggtttctgctgagggaaaggagaccacagagcttccttctggcaatgttagcactgaaaacaatttcatagcttcgagattacaatcagatgctgcttctgacaacaattcggcatcagatgttagctgcgaacatgctaacatggtaacctgtgctacaatggatggtgttccagcgccttctggtgatgtcactaatgtagatgcagttattggtcacaaagatgtcaaaatgtcacttttaagtgagatggggtttagtcccttagatatagagaaagaaaccgtggacaagatttctgtggaggccagtttatcaggtctgaagacatcttgtcaagtgatagctggattagatcctggttctgaatccaaaaaaggcgcttcttctggtgctgcaggacagatattatgcgagtcagctgaacaatctccattaatggtggatgctagtaaaacagaaggacctcattcagaagtaattgataaggtcagcctgcagagcacaaaggaaatgaatgtgtgtccagttctttgtgattcaactgcaaacaagggtgatgatgctgaagtgtttgtaaaagaaaatgatgaaaaggaatcatccaaagtttcagaaccgactgtaaacaagaatgagatgctaggacctatctcctcagaaaaggaagagtgtcgagaggatactaaccagaaaggtcaggaagaaaatgaagctgccatagtgtctgaagataatagtgatgggaatattgctgtccctagcacaaacgattgtggaagttgtgctgatgttggcaaagcagccagtggttcccctactgtcatcagagccgccagagattttcagagtgaaagtgacaaggatggagccaaatgttcagttgagcagactgctgttgctgatagcaatgccagcaaagctttgtctggttctcgggatccgaaacaaaatgatgcatccaaagatgaaaggagcttcacttttgaggtcagtccattggcaaatatgcctcaaaaagaagttggcaataaatggcagccctttttgaacaaaccagccactaaagcctacccgattttgaatgcttctccatcatcgggtttagtccaaatagatcccaagcttgcccaagatcttcctcatggaagtccaaaggtgtctgatgtagccattgtgcgtagtggttctaaaggtacttctgagcgtaaaacaagacgatcatctggtaaggccatggaaaaggaaagtgcgagaaagggaaatcctattaaagatactgcttctgtgaggctagaaaagggggcaaaaacaaacaatgtctccccaagctcttctgggatattgcaacatgtgcaatcaaatgagatgcagcgctatggtcatgcggattccagtactatgaaaccatttgttcatgcatcttcaagccttccagatctgaattcttctgcttctccatctgtgatgtttcaacaacccttcacggacttgcaacaagtgcaattgcgtgctcagatctttgtttatggcgctttgatacaaggaacagctccagatgaagcatatatgatatcagcatttggaggatctgatggtgggaaaaccatatgggagaatgctctacgctcttctatagaacggcttcatggtcaaaaacctaatctcacttctccagaaacccctttgcagtcacgtcctggtgtcagagctcctgatcaagcaattaaacagagtactgttcaaagtaaagtaatctcttcacctattggtcgatccagcaagggtactccaacaattgtgaaccccatggtacccctttcttcaccgctctggagtgtacctacccccgctggcgacacatttcaatcaagcagcatgccaaggggtcccattatggatcatcagcgggcactttctcctatgcatcctcatcaaactccacagataagaaattttgctggtaatccttggctatctcaggcacctttttgtggtccctgggctacatctccacaaacacctgcacttgacacaagtggtcatttttctgcgcaattgcctatcacagaaccagttcaattgacacctgtgaaagacttatccatgccaattatctctggtgcaaagcatgtttctcctggtcctgtagctcagagtggggcttccaccagtgtttttactgggacttttcctgttccagatgcaaaaaaggctgcagtgtcatccagtcaacctcctgctgatccaaaacctaggaaaagaaaaaagaactcggtttctgagagtccgggccagaatattttgcctcctcaccttcgaacagaatcagtttctgctcctgttgttaccagtcatctgtctacttctgttgccattacaacccctgtcatctttgtttctaaagcccctacagagaaatttgtgacttctgtatctcctacacctactgatatcagaaacgggaatcagaatgcagaacagaggaatattttgtcagaggaaacccttgataaagtgaaggctgcgagagtgcaggcagaggatgctgctactcttgctgctgctgctgttagtcacagcctggaaatgtggaatcagttagataagcagagaaattctgggttatcaccagatattgaaaccaaactagcttctgcagctgtcgcaatagcagcagctgctgctgttgcaaaagcggcagcggcagctgccaaagttgcatctagtgctgcattgcaagcaaaactgttggctgatgaagcagtaaattctggtggttacagcaatcccagtcaagacaatacaatttctgtttctgaaggcatgaagaatttgggaaaggctactcctgcttccatcctgaagggtgatgatgggacaaacagttccagttcaatccttattgtggcaagggaggctgctagacggagagttgaagttgcttccgctgctgcaaaacgagctgaaaatatggatgctattgttaaagctgcggagctggctgcagaagctgtgtcccaagctgggaagatagttgctatgggcgatcctttgccactgaatgagctagtagctgtgggtccagagggatattggaaagtagccaaaataaataatgaactgatctctaaatcaaatgatataggtagaaaaactcttaatatagatagagttggagaaagaccacgcactccaactgaggggtccactgaggaccatgttagattggaagatggtttcttgagttctggtgcagctgctgcaaaggatgttaaaggacaaaagggctacaaggtgtctgaatctgagaatggtttaagatctttgggaactatagaaaactttaatagcatcaaggaggggtcccttgtagaggttttcaaagatgggaatggatttaaagcagcctggttctctgccaatgtcgtggatttaaaggatgggagtgcatgtgtgagttatactgatctttcatcagttgaaggctcagagaagctaaaggagtgggtgacacttaaaggtgaaggagagagagcgccaaaaatacgaatagctcgccctattactgccgtgcaattagaaggaacaaggaagaggcgacgagctgccacggtggaccatatttggtctgttggtgatagagtggatgcatggatacaagatagctggtgggaaggagtggtcattgaaaggagcaagaaagatggcaccacactaacagtccaatttccaggcatgtacaattga

SEQ ID NO: 446 - protein, 1718 aa, Populus trichocarpa
MDYDENDFQNHNLHLAGEGSNKFPSVLQPYALPKFDFDDSLNGSLRFDSLVETEVFLGIESNEDNQWIEDFSRGTSGIQFSSSAAESCSLSRRNNVWSEATSSESVEMLLKSVGQEDNTPIQTNTKESDACDELGCILKHMEPILKQDNDTSPKVEDTANLQATFLPGEDVEDFSVLDNDVGQQQPLDDSSQDHKGEASADSGLGPLVDPSAVSVEVRQPVIEGSLSIDSKSNHVTQREIDNVVNGSSNDRPQKVPASGMQDGASVQNITTGNIELNEKDGPDDINNTSDDSKDFLETDTGENQKKGQVLSQEGQMEDENPCSDAVESMEEANVIETNSSNLGEPSCKILKGHSGFPEDVVTSDQSEVDTVGGSVMAVEGNTTFKRDEIEDSNGSQLDNKNLSNKCEGSLLSAEDCEPAKVKVGGTSSSDTGGVSSLATVCCSAEVVGEVAHVSSSFLVESSQICGKSMVSAEGKETTELPSGNVSTENNFIASRLQSDAASDNNSASDVSCEHANMVTCATMDGVPAPSGDVTNVDAVIGHKDVKMSLLSEMGFSPLDIEKETVDKISVEASLSGLKTSCQVIAGLDPGSESKKGASSGAAGQILCESAEQSPLMVDASKTEGPHSEVIDKVSLQSTKEMNVCPVLCDSTANKGDDAEVFVKENDEKESSKVSEPTVNKNEMLGPISSEKEECREDTNQKGQEENEAAIVSEDNSDGNIAVPSTNDCGSCADVGKAASGSPTVIRAARDFQSESDKDGAKCSVEQTAVADSNASKALSGSRDPKQNDASKDERSFTFEVSPLANMPQKEVGNKWQPFLNKPATKAYPILNASPSSGLVQIDPKLAQDLPHGSPKVSDVAIVRSGSKGTSERKTRRSSGKAMEKESARKGNPIKDTASVRLEKGAKTNNVSPSSSGILQHVQSNEMQRYGHADSSTMKPFVHASSSLPDLNSSASPSVMFQQPFTDLQQVQLRAQIFVYGALIQGTAPDEAYMISAFGGSDGGKTIWENALRSSIERLHGQKPNLTSPETPLQSRPGVRAPDQAIKQSTVQSKVISSPIGRSSKGTPTIVNPMVPLSSPLWSVPTPAGDTFQSSSMPRGPIMDHQRALSPMHPHQTPQIRNFAGNPWLSQAPFCGPWATSPQTPALDTSGHFSAQLPITEPVQLTPVKDLSMPIISGAKHVSPGPVAQSGASTSVFTGTFPVPDAKKAAVSSSQPPADPKPRKRKKNSVSESPGQNILPPHLRTESVSAPVVTSHLSTSVAITTPVIFVSKAPTEKFVTSVSPTPTDIRNGNQNAEQRNILSEETLDKVKAARVQAEDAATLAAAAVSHSLEMWNQLDKQRNSGLSPDIETKLASAAVAIAAAAAVAKAAAAAAKVASSAALQAKLLADEAVNSGGYSNPSQDNTISVSEGMKNLGKATPASILKGDDGTNSSSSILIVAREAARRRVEVASAAAKRAENMDAIVKAAELAAEAVSQAGKIVAMGDPLPLNELVAVGPEGYWKVAKINNELISKSNDIGRKTLNIDRVGERPRTPTEGSTEDHVRLEDGFLSSGAAAAKDVKGQKGYKVSESENGLRSLGTIENFNSIKEGSLVEVFKDGNGFKAAWFSANVVDLKDGSACVSYTDLSSVEGSEKLKEWVTLKGEGERAPKIRIARPITAVQLEGTRKRRRAATVDHIWSVGDRVDAWIQDSWWEGVVIERSKKDGTTLTVQFPGMYN

SEQ ID NO: 447 - DNA, 1023 bp, Glycine max
atgaatcacttattaacaatgcaacagaaaaggctgtactcaaacttcttcaactggctattgaagtgtataaaattactcatgtcagaaccaagtgaccagcttctaccatataacagtgaacttgttattgtattcctgaagtttctctatgaacaagatccagttaaacaattgctggaagtatcagaaacagaatatgaagttgaaattgatttggaaacaatgcagagagttagagaattagttcagtttgggggatttgctgacactgaatatctaaggagaacattggttaaagaatttcagctgatggaattaagctttaaagaggcttttgaaatgccttttaccacaatatcaagaaagatactttgtgaggatatactacctctgtttcctcttccatctttgccaaaatcatcttcttccatgtggattcccacttcagtatcatattatgaggatccctctagagcttctgtgccaccttactcttgtcaaaaccagtttattgattacatatctttccaagtacctgatgagtgtttctcagatattgtaaattgtatatgcatagtcagaggattcatgcatgactcagactgtctaaagaaggggtatagttctttggaagctgtactgttatgtgttcctgttgattatcaatgtgtggatctgtctttgtacaaggatagtcaaatcgtcctgttactaaacaaagctactaatacatcagaaagtgctggagatggttgtatgatgattctgcaagtaagtgatctaccatatgtctctatgtcaagatctgcttgtatagatgtttggaggttaccagaactaaaggattctgtcgcttacctgaatattggggatgagaaatctcgcaccattcgtcattctgtaattgctcccttggcagttagtgcatcaagaggcgtggcttgtgtatttgctgcaacaaagcgtgctctagtctacattttggaggaagatgaagatgaggtctcggatgtagaatag

SEQ ID NO: 448 - protein, 340 aa, Glycine max
MNHLLTMQQKRLYSNFFNWLLKCIKLLMSEPSDQLLPYNSELVIVFLKFLYEQDPVKQLLEVSETEYEVEIDLETMQRVRELVQFGGFADTEYLRRTLVKEFQLMELSFKEAFEMPFTTISRKILCEDILPLFPLPSLPKSSSSMWIPTSVSYYEDPSRASVPPYSCQNQFIDYISFQVPDECFSDIVNCICIVRGFMHDSDCLKKGYSSLEAVLLCVPVDYQCVDLSLYKDSQIVLLLNKATNTSESAGDGCMMILQVSDLPYVSMSRSACIDVWRLPELKDSVAYLNIGDEKSRTIRHSVIAPLAVSASRGVACVFAATKRALVYILEEDEDEVSDVE

SEQ ID NO: 449 - DNA, 2334 bp, Medicago truncatula
atggaaatggatgaggcatgtcgagtgcttccatttcagcttcaattcgataaaccccttgcttctcaggtgaaaatcgcggagtggaatcctgagaaggatttgcttgctatggtttctgatgactctaagatcttgcttcatcgtttcaattggcaacgcttgtggaccattactccaggaaaatgtgtaacgtccttgtgttggcgtcctgatggtaaggcaattgctgttgggcttgatgatggaacgctgtcactatatgatgttgaaaacgggaagttgttaagaagcttaaaatcacactgtgctgccatcatatgtctcaattgggaggaggacagccacctaattactgatgaccattaccacacctcaaagtatgaagatagaacctcccgtttctttcctcctgctccaaaaattcctcgaatgcctggattggtatctggggataatggcttcatggatgatggtgacgattcatttgaggaactgtcaaattcttctcaccaacgatttaacgtcttatgtagcggagacaaagatgggaatatatgttttagtatatttggcatcttccctatagggaaaactaacatacacaacctcacttttcctacttctagtgatggcgctaaaagcagcaaaagacttttgaatgcttgtatacacaaggttgctttatcaaaagatctttgtcgtttgatagtcatgtgctcaggagaccttgttgaagttgttgatgacctgggcgttattcacatggctgggcataatgcaaatggcttgcattgcttagccctgaacacagctatattttggaataggaaaaacgagctccatcaggtagctcagcaagcttctaacatcgaggatttgactgaggttgttcgggcatcattatcagtcatgtctaggcagtggtctgatgccatgcatacattcaaggaaaagttcaactctttgtctactctgattacggatcacggacttgattcctctccccaagaggagtttctgggccttttgggtggtgcaaggaccagtccaccagttcatcaatttcttgttagcactcttggtgaagtgggtgttaagcgcatttcgaaggttctatgcggtgctggcaaagaacttcaacgtattgtcttggagcacctccagcctgctgtagaagttattgggttcagaatgggagaattaagagggctttcaagatggcgtgcacgatatcacggcattggcttggatgaaccactcattagcaatgcaacagaaaaggctggtatgctacttgtacaagttgaaagatttatgagggttctttcatctgtcttgcagcagtattcaaatttcttcaactggctattaaagtgtatcaaattactcatgtcagaaccaagcgaccagcttttaccatataacagtgaacttgttattatatttctgaagtttctgtatgaacaagatcctgttaagcaactgctagaaatatcagaaacagattatgatgttgaaattgatttggagacagcggaaagaattaaagaattagttcagttcgggggattttctgacactgaatatctccggagaactttggctaaagaatttcaacagttggagttgagctttaaagaggcctttcaaatgccttttacgacaatctctagaaagatactttgcgaggatttattaccgctgtttccccttccatctttgccaaatgcgtcatcaatgacgagaattagtacctcaatatcatattatgaggattcctccagagcttcttcctcacattacaccggtcaacatcaagttattgattacatatcttttcaagtacctgacgagtctttctcagatattgaaaaatgcatatgcatagtcagaggatttatgcatgacgcagactctctaaagaaggggtacagttctttggaagctgtgctattacgtgttcctgttgattatcaatgtatcgatctgtcattgtacaaggatagtcaaattgttttgctactaaacaaagctactaatacttcagaaagtgctggagatggctgcatgataattctgcaagcaagtgatctcccatatgtctctatatcaagatctgcatatatagatgtctggaggttacaagaactgaaggattctgctgcttgcctgcatataggggatgagaaaactcgtaccatcccacattgtgtaattgctcctttggcagttagtgcttcaagaggcgtggcctgtgtatttgctgctagaaagcgtgccctggtctatattttggaggaagatgaagacgaggtatcggatgcagaatga

SEQ ID NO: 450 - protein, 777 aa, Medicago truncatula
MEMDEACRVLPFQLQFDKPLASQVKIAEWNPEKDLLAMVSDDSKILLHRFNWQRLWTITPGKCVTSLCWRPDGKAIAVGLDDGTLSLYDVENGKLLRSLKSHCAAIICLNWEEDSHLITDDHYHTSKYEDRTSRFFPPAPKIPRMPGLVSGDNGFMDDGDDSFEELSNSSHQRFNVLCSGDKDGNICFSIFGIFPIGKTNIHNLTFPTSSDGAKSSKRLLNACIHKVALSKDLCRLIVMCSGDLVEVVDDLGVIHMAGHNANGLHCLALNTAIFWNRKNELHQVAQQASNIEDLTEVVRASLSVMSRQWSDAMHTFKEKFNSLSTLITDHGLDSSPQEEFLGLLGGARTSPPVHQFLVSTLGEVGVKRISKVLCGAGKELQRIVLEHLQPAVEVIGFRMGELRGLSRWRARYHGIGLDEPLISNATEKAGMLLVQVERFMRVLSSVLQQYSNFFNWLLKCIKLLMSEPSDQLLPYNSELVIIFLKFLYEQDPVKQLLEISETDYDVEIDLETAERIKELVQFGGFSDTEYLRRTLAKEFQQLELSFKEAFQMPFTTISRKILCEDLLPLFPLPSLPNASSMTRISTSISYYEDSSRASSSHYTGQHQVIDYISFQVPDESFSDIEKCICIVRGFMHDADSLKKGYSSLEAVLLRVPVDYQCIDLSLYKDSQIVLLLNKATNTSESAGDGCMIILQASDLPYVSISRSAYIDVWRLQELKDSAACLHIGDEKTRTIPHCVIAPLAVSASRGVACVFAARKRALVYILEEDEDEVSDAE

SEQ ID NO: 451 - DNA, 2355 bp, Oryza sativa
atggcagagtggaatccagagaaggatctacttgctatggttactgatgactctaaggttgtccttcatcgattcaattggcaaaggctatggactatctccccagggaagtgcatcacatctatttgttggagccccgatggtaaaatagtagcacttggtaccgaagatggtttggttcttttgcatgatgttgagaatgggaaaatgctaagaagaataaaatcccatgatgttgccattgtatgtttgaactgggcagaagatgagcttctatcaaggaccgacaaggatggcctgttatcctatgaagaccgcactgcacgcttctttcctcccgctcctgtgattcctaggatcggtgggctgagttctggagacactggtctttcagatgagaatgaagaatccattcaggaattttcaagcgcttcctgccagcgttttaatattctgtgcagtggtgataaaggtggttgcatttgcttcagtatctttggaatattcccagttggaaagataaacattaatgaggttcctatccatttccaatcctctggaaacaaaactagttaccggcttcaggatgcttccataagcaaggtctgtttatcaggaaacctccatcagttagttctcctgtgccctggaaagctgattgatattgacaacctttctcatagtaatcacatttctactgggttacattgtctgcatttggacacttctatctttttcaacaggaaaaatgagctacatcagatctcccaacaagcatcaagtattcaagatctggttgaagttgtccgttcttccctatccatgatggccaaacaatggtcaagtgccatgaacttatttaatgaaaaattcagcgccttgccttctctgatagctgcccatgggatggaatctagctctgaggatgagtttatgagccttttgtttggtacacgtacaagtccagcacttcaccaatttttagtcagctcacttggtgaagcggctctcaagagaatagctaaggctgttgatagtgctggacgagaacttcgtgttgttgtcagtgagcatcttcagcctgcagttgaaattatttcattcagacttgcggaactaagaggccttgcaagatggcgctcacgatttcagaacgttgggttagatgaaaagcttatttatggtgtgactgagaagataggaatgctagttgttcaagttgagcgtttttcaagggttgcggctactgttctttatctggtaccattcttctctgcttgttttcttgccatgttctcaattctcaacctctgttttaacttaggccttctgcccgagattcccctccctgtatcagaatatgacatcttggtgcatgtagtatctgctgagttccaaaatttcttcagttgggttttaaagtgtgttaagattttattaagtgaaccaaccgatcaagttccagctgcgaacagtgaactcgtggtgctttttctgaagttccttcttgataaggatccaatcaaacagttacttgatgcaaatcaaagatttgagtgtgatttggacactgtaagacatcttgagcagctagtagttttggggggatttacagatacccattttttggaaaagactttaatgaagcaatttaatgagctggatgaaagcctggaggaggctttctcgatgccattcaccactatttcttcacaaatacattgccaagaattgcttcctctttatcctatcacgtcatcggttgacttgtcatcaacctgtattctgacatcagtgtcattctataaggatgaagattctcagaatagtgggtcttcatatagcttgactgactatatatgcttcaagatacccgatggatccttgaacttgaagaattgcattggtgtgataaaggacttctctaactcttctgccagcggaccatcttcttcaggatttctattgcatatacctgatgaatatgagtgcgttgatgtatctctttacaaggacagccagattgttgtactactcagtgaaaggtcatattctgatggtcctggaagttcttatattgtaatgctgcagatggagaacttctcttttgtgcctctctcaaggatgttcccttcaaatatttacagtgtacaagagctgtcggcacaggagctccagttggacaccgactatgggaaaaaagttcgtagcatacctcacgccgtgtccactccactggcagtcagtgcctcaagaggagtggcttgtgtcttttcatctcggcggcatgctttggtttatatccttgatgaagatgaggatgaggatgaggatgaatcttctgatatggaatga

SEQ ID NO: 452 - protein, 784 aa, Oryza sativa
MAEWNPEKDLLAMVTDDSKVVLHRFNWQRLWTISPGKCITSICWSPDGKIVALGTEDGLVLLHDVENGKMLRRIKSHDVAIVCLNWAEDELLSRTDKDGLLSYEDRTARFFPPAPVIPRIGGLSSGDTGLSDENEESIQEFSSASCQRFNILCSGDKGGCICFSIFGIFPVGKININEVPIHFQSSGNKTSYRLQDASISKVCLSGNLHQLVLLCPGKLIDIDNLSHSNHISTGLHCLHLDTSIFFNRKNELHQISQQASSIQDLVEVVRSSLSMMAKQWSSAMNLFNEKFSALPSLIAAHGMESSSEDEFMSLLFGTRTSPALHQFLVSSLGEAALKRIAKAVDSAGRELRVVVSEHLQPAVEIISFRLAELRGLARWRSRFQNVGLDEKLIYGVTEKIGMLVVQVERFSRVAATVLYLVPFFSACFLAMFSILNLCFNLGLLPEIPLPVSEYDILVHVVSAEFQNFFSWVLKCVKILLSEPTDQVPAANSELVVLFLKFLLDKDPIKQLLDANQRFECDLDTVRHLEQLVVLGGFTDTHFLEKTLMKQFNELDESLEEAFSMPFTTISSQIHCQELLPLYPITSSVDLSSTCILTSVSFYKDEDSQNSGSSYSLTDYICFKIPDGSLNLKNCIGVIKDFSNSSASGPSSSGFLLHIPDEYECVDVSLYKDSQIVVLLSERSYSDGPGSSYIVMLQMENFSFVPLSRMFPSNIYSVQELSAQELQLDTDYGKKVRSIPHAVSTPLAVSASRGVACVFSSRRHALVYILDEDEDEDEDESSDME

SEQ ID NO: 453 - DNA, 2466 bp, Physcomitrella patens
atggttggggaagagagtgggagtgggagagcggggcagtgccgcggcgctgttctggtggcagcgatggcggaccttgctcaggatgtcgacgatgaagccggtgaggagacgctggtcttcaccttgcacctcgacaagcctctcagctcgcagttgcatgagagtcttggagtttttcgagctgcaattactcttgttggttgtttcgtgggagtcgctgggcattcgttcgaggtggagaaggcagcatggaatccagacaaggatttgctcgccatggtcactcgagaccatcaaatcattgtgcaccgattaaactggcagcgactttgggcgatttctccagaaatgacagttacttcactttgctggcgtcccgatggaaaggctttggcagtcggacacgatgatggcagcatcgcaattcatgacgttgagaatggtgatgtattgcgacagcaaacaacacacgatgcgccggtcgaatgcttgtattgggctatggagggacatcaatcagtgggtcacgaagatgatgtcttctgctacgaagatcgaaccccaagattctttccgtcacctccacatgctcctcctttgcctggaacggtctcatctttcgatatgtctggagtattaggtcatgctgctgaagaccaaacctatgctaatcggaagaatgtgcttcgagctattcatgaacgactttatattctctgcagtggagatcgaaatggcaccatttgcttaagtgcatttggtgtttttcctattggaaagttggacatcagggacctatctataaatggaatgacatctgactacaacatcgtggcaaagccaatataccgacttctggatgcctcagttcaacaggtcgctttgtcaaaagacctccgcaacatgacagtgatttgtagtggagtccaatcggtggcgagcttgcatgttatggcaggtgctgagtctagggcaactggactatatgccatttctattgacacttcccttctaggagataggagaaaggaactgcgtcaagtggcgcttcaggcttccaaggtggaagagttgttagaagttgttgaggccaccgtgatggtgatgcgcaagcattggagcgatgctatttcttcatttgaaaacaaatttcgaactttttctaccttgcttacagagcatggttcacatgtgaagcctcgtgatgaatttttaagtcttcttgcctgtggctccgcaagtgcggcgttgcaccaatttcttgctgcttctttgggagaagcaccagcagctgagctcatttctttcataattggtgaactgcgaggtctctcccgatggaggtcgcgtctgcgtagaattggacttcatgaaactctccttgaacaagccatggagaatgctggcatgctccttattcaagttgagcgccttttgcgcattgtctctgacacgaatggccagtttcggctctttttcgtttggctcacaaagtcgttgcgtcaattaaatggtgatactggaccacaagctagccagcttccggccattgacagtgcaggggttgcagactttttacgtactcactttgagaaggatccaatcggcccacaccttgcacccgcctcggatgaacttactatggacgtcaacgtcgaggagcaggctaggatggaggaactagcgataatgggaggatttgcagatactaagtttttaaccagaactttatcctcccaagttcatcggcttcgagctagctgtcaggaggcatttcaaatgccagtcaaagaagtgtctcctaatcttcgaccccggtgcatgttgttgttgttgtctcctttgccgtcattaccaccaccttcgaccgtaccactttctctcacctacttcgagaccgattcaggaagcaaaatgaaggacatcctccttgaagactacatttgtttacgagtgcaggatgatacaaattcaactgatcagagttctgtgataatattgcgaagcttcgcagtgtcggggcactgcgcaccaggaggaaaaggtttagaagtgtttgcgttgcaattggagaagactctgcactgtattgacttggctctttacaagcaaaagcaagttatactgttagtaagcgagaaggatccggaggacactgggaagatcgttcaaacatacttaatgatgctccaactggaggaccttgaatttgtggcgttgtcctctaccagtacccacatgagtcgtgtgtccttgttgcatttgtgctccaatcttggagcagttacggttgttggtttaaacagtggtaaagtaagggctattcaacaggttgatgcagttcctcccttggctgttagtgcttctcggggtctggcatgtgtctttgctgggcaacggcgtgcgctgctttacgacctggaggaggacgaagaggacaaagacgacgatgatatggagtga

SEQ ID NO: 454 - protein, 821 aa, Physcomitrella patens
MVGEESGSGRAGQCRGAVLVAAMADLAQDVDDEAGEETLVFTLHLDKPLSSQLHESLGVFRAAITLVGCFVGVAGHSFEVEKAAWNPDKDLLAMVTRDHQIIVHRLNWQRLWAISPEMTVTSLCWRPDGKALAVGHDDGSIAIHDVENGDVLRQQTTHDAPVECLYWAMEGHQSVGHEDDVFCYEDRTPRFFPSPPHAPPLPGTVSSFDMSGVLGHAAEDQTYANRKNVLRAIHERLYILCSGDRNGTICLSAFGVFPIGKLDIRDLSINGMTSDYNIVAKPIYRLLDASVQQVALSKDLRNMTVICSGVQSVASLHVMAGAESRATGLYAISIDTSLLGDRRKELRQVALQASKVEELLEVVEATVMVMRKHWSDAISSFENKFRTFSTLLTEHGSHVKPRDEFLSLLACGSASAALHQFLAASLGEAPAAELISFIIGELRGLSRWRSRLRRIGLHETLLEQAMENAGMLLIQVERLLRIVSDTNGQFRLFFVWLTKSLRQLNGDTGPQASQLPAIDSAGVADFLRTHFEKDPIGPHLAPASDELTMDVNVEEQARMEELAIMGGFADTKFLTRTLSSQVHRLRASCQEAFQMPVKEVSPNLRPRCMLLLLSPLPSLPPPSTVPLSLTYFETDSGSKMKDILLEDYICLRVQDDTNSTDQSSVIILRSFAVSGHCAPGGKGLEVFALQLEKTLHCIDLALYKQKQVILLVSEKDPEDTGKIVQTYLMMLQLEDLEFVALSSTSTHMSRVSLLHLCSNLGAVTVVGLNSGKVRAIQQVDAVPPLAVSASRGLACVFAGQRRALLYDLEEDEEDKDDDDME

SEQ ID NO: 455 - DNA, 2181 bp, Populus trichocarpa
atggaaaccgacgagaccgatcgcgtgcttcctttccaacttcaattcgataaaccggtcgcttctcaggttaaaatcgcagagtggaatcctgaaaaggatttactcgcaatggtaactgaagactccaagattttactccatcgattcaattggcagaggttatggactatctcccctggaaggaacattacatcattgtgttggcgaccggatggtaaagcgattgccgttggtcttgaagatggaaccatttatttacatgatgttgagaatggcaaattgttgagaagcttgaagtctcataccgttgcagttgtgtgtcttaattgggaggaggaaggacaacttattagagatgactctaaaaactcctcatcatatgaagaccgcacttcccgtttctttcctcctgctcctagggtcccccggatgcctggagtagtgtctggagatactggcttcatggatgacagtgaagattcatatagagagctgtcaaactcttcgtaccaacgctttaatattctgtgtagcggagataaagatggaagtatatgctttagcatatttggtatatttccaatcggaaaaattgtttctctgtcgaaagacctctgtcgtttgattgtcatgtgctcaggagaacttaatgaaaacacagaatcaagagaaagccaaatggtcaagcagggtatgcatagcttagtgctcgatacttctatattttggaagaggaaaagtgagctccatcaattggctcaacaagcttccaatattgaggacttaactgaagttatcagggcgtctttatcagttatgtgcaagcagtggtcagatgccatgcacacatttcatgagaaatttgattctctgtctaccctgattattgaccatgcactggactctactccacaagaggaatttctcagccttttagggggtgctcggaccagttcagcagtacatcaatttctagttaactcccttggtgaagtgggtgtgaagcgcgtgttaaaggtcatttgtgggacagcaaaagaacttcagcgcattgtccttgatcatttacagcctgctgcagaaattattggatttagaatgggagagctaagaggcctttccagatggcgtgcacgctaccatggtattggtttggatgagatgcttattaacaatgcaacagaaaaatctggtatgatactagtgcagattgaacggtttatgagggtcctttcatctgtggagcagcagttttcaaatttcttcaattggcttcttaaatgtataaagctgcttatgcaagaacccagtgaccagcttcttccatacaatagtgaacttgttgtcatattcttgaagttcttatacgatcaggatccagttaagcagttgctggaagttgatcatgatattgaagttgacttagaaacaatgcagagagttaaggaattagttcagtttgggggattttcagattgtgaatatctgcaaagaacattggctaaagaattccagcaaatggaggacagcttcaaggaagctttcctgatgccctttactaccatatcaagaaagatgctatgtgaggatttgctgccactgtttcctcttccatcttcatcttcatcagcatctgtatctatggcaattcccatgtcaatatcatactatgaggatgcttctcaagctgtttcatctaatcagacatgtcaacacagttttgttgactatgtatgcttccaagtacctgatgagccattttcagatattgcaaactgtataggcgtaataagaggatttacgcatgacttgagcagttcaaagaatggttatacttcattggaagctgtactgttgtatgttcctgctggttacgagtgtgtggatctctcattatataaggatagtcaaattgtcttgttgttaaatggggcatctgcgtcatctgaaagttctggagatgcttgtatgatgattgtgcaagctagcgagcttccatttatatctatttcaagattcaccgacttaaacttatggaacttgtatcaactgaaggattctactgtgcaactgcaaatggagaacgaaaaagttcgcaatattcctcactctgtaattgctcccttggcagttagtggtaagtgtccctcctctcagctccattccattggtttttaa

SEQ ID NO: 456 - protein, 726 aa, Populus trichocarpa
METDETDRVLPFQLQFDKPVASQVKIAEWNPEKDLLAMVTEDSKILLHRFNWQRLWTISPGRNITSLCWRPDGKAIAVGLEDGTIYLHDVENGKLLRSLKSHTVAVVCLNWEEEGQLIRDDSKNSSSYEDRTSRFFPPAPRVPRMPGVVSGDTGFMDDSEDSYRELSNSSYQRFNILCSGDKDGSICFSIFGIFPIGKIVSLSKDLCRLIVMCSGELNENTESRESQMVKQGMHSLVLDTSIFWKRKSELHQLAQQASNIEDLTEVIRASLSVMCKQWSDAMHTFHEKFDSLSTLIIDHALDSTPQEEFLSLLGGARTSSAVHQFLVNSLGEVGVKRVLKVICGTAKELQRIVLDHLQPAAEIIGFRMGELRGLSRWRARYHGIGLDEMLINNATEKSGMILVQIERFMRVLSSVEQQFSNFFNWLLKCIKLLMQEPSDQLLPYNSELVVIFLKFLYDQDPVKQLLEVDHDIEVDLETMQRVKELVQFGGFSDCEYLQRTLAKEFQQMEDSFKEAFLMPFTTISRKMLCEDLLPLFPLPSSSSSASVSMAIPMSISYYEDASQAVSSNQTCQHSFVDYVCFQVPDEPFSDIANCIGVIRGFTHDLSSSKNGYTSLEAVLLYVPAGYECVDLSLYKDSQIVLLLNGASASSESSGDACMMIVQASELPFISISRFTDLNLWNLYQLKDSTVQLQMENEKVRNIPHSVIAPLAVSGKCPSSQLHSIGF

SEQ ID NO: 457 - DNA, 795 bp, Zea mays
atggatactgcaagacatgtagaacagctagtagtttttggaggatttacagacacccaatttttggaaaagagtttggtaaatcaattcaatgaattggaagatagcttgaaggaggctttcttgatgccatttactgctatctcttcgcagatacaatgtcaaggattgcttcctttatatcctgttacatcatcagctaccttgtcatcatcctgctcgccaacatcaatatcattttataaggatgaagattcatcgcatgaggaatcctcctatagcttgactgactatgtatgcttgaagatacctgatggatcattaaataaagtaaattgcatcggtgtgataaagggctctggtaactgttgtactaccctcagcatgatgtcactttcaggttttctgttgcatatacctgacggatatgagtgtgttgacctgtcactttataaggacaaccaggtagttttactactgagtgaaacgtcttgttctgatagccctggaaaatcttggatggtgatgctgcaaatagagaacttttcctttatgccactctcaggaacattccctgcaaatatttacagtttgcaaaaactggtggcactcgatctgcaattggacacagattatgggaaagttcgtagcatacctcacaccgtatctactccatttgcagttagtgcatcgagaggagtagcctgtgtcttttcatcccggaggcatgccttggtttatatccttgatgaggatgaggaagcggagggggatgaaacttccgatatggagtga

SEQ ID NO: 458 - protein, 264 aa, Zea mays
MDTARHVEQLVVFGGFTDTQFLEKSLVNQFNELEDSLKEAFLMPFTAISSQIQCQGLLPLYPVTSSATLSSSCSPTSISFYKDEDSSHEESSYSLTDYVCLKIPDGSLNKVNCIGVIKGSGNCCTTLSMMSLSGFLLHIPDGYECVDLSLYKDNQVVLLLSETSCSDSPGKSWMVMLQIENFSFMPLSGTFPANIYSLQKLVALDLQLDTDYGKVRSIPHTVSTPFAVSASRGVACVFSSRRHALVYILDEDEEAEGDETSDME

SEQ ID NO: 459 - DNA, 1206 bp, Brassica napus
atggataaatatatgggactaagtgacgattctcctcctcgaacaagcacgcttgttctgtctgagttcattggttgctctccttctttaagtggcgccattagggttaacccttgggacgttgatgcggtggctgattcaatgtactctgctctcaccatgcctgattctgagaagcagctacgccataagaagcactatcaatacataagtacacacgatgtggcgtactggtcgcacagctttgcacaggatttggagagggcgtgtcgggatcattacagtaaaaggtgctggggtgtgggttggggtttaggttttaggctcatcgctctctctcctaattacagaaggctatccgttgagcaaactgtcagtgcttatagaagatcgagcaagagagcaatatttcttgattatgacggtactttagttccggaggcctcaattgtaaaggaaccaagtgctgatgtgatctctgcgctgaagacactgtgtagtgatcctgataacactgtatttgttgttagcgggagagggaaagtttctttaagcgagtggcttgcgccgtgtgagaatcttggaatagcggctgaacatggttacttcacaaggtggaatgagtcttgtgactgggaaacaagcggcttttctaatgactttgaatggaagaaaatagtggaacctatcatgagactgtatacagaaactacagatggatctacgatagaagcaaaagaaagtgctctagtgtggcatcaccaggatgctgaccgggactttggttcttgtcaagccaaggaacttctggaccatctagaatctgttcttgtaaatgagcccgttgtggttaacagaggtcaccaaatcgttgaagttaagcctcagggagtaagcaaaggtcttgtcaccgggaaagttcttaggagaatgcttgaagaagggaatgcaccggattttgtggtatgcattggggacgacagatcagacgaagacatgtttgagagcatagcaacaactctctcggctcagccatcgtcagagatattcgcgtgtacggtgggaagaaaaccaagcaaagccaagtactttctggatgaagtaagcgacgtggtgaagctgcttcaaggacttgccaacacttcttctagcccaaagcctaggtacccttctcaccttagagtctccttcgaaagcgtggtatga

SEQ ID NO: 460 - protein, 401 aa, Brassica napus
MDKYMGLSDDSPPRTSTLVLSEFIGCSPSLSGAIRVNPWDVDAVADSMYSALTMPDSEKQLRHKKHYQYISTHDVAYWSHSFAQDLERACRDHYSKRCWGVGWGLGFRLIALSPNYRRLSVEQTVSAYRRSSKRAIFLDYDGTLVPEASIVKEPSADVISALKTLCSDPDNTVFVVSGRGKVSLSEWLAPCENLGIAAEHGYFTRWNESCDWETSGFSNDFEWKKIVEPIMRLYTETTDGSTIEAKESALVWHHQDADRDFGSCQAKELLDHLESVLVNEPVVVNRGHQIVEVKPQGVSKGLVTGKVLRRMLEEGNAPDFVVCIGDDRSDEDMFESIATTLSAQPSSEIFACTVGRKPSKAKYFLDEVSDVVKLLQGLANTSSSPKPRYPSHLRVSFESVV

SEQ ID NO: 461 - DNA, 2724 bp, Glycine max
atgcctgggaacaagtgcaatggtaattctaatagttttccggttccggatcgtcatgaacgacttatgagaggaagagagctaagaaaaagcagcagggcatctcctgatagtaatagtattagtaatgtgggtagtgaaatttttgagcatgacctgcgcttaagagaagataataactctgctgctcccattgttgaacgatacctggaagaagtggcagcagctgcagcagcagcgcggggagaaaggaaagatgggagacctttcagacaacggcttttggtggtggccaacaggctgccagtctcagcaattaggaaaggcgaggattcgtggtctttggagataagtgctggtggcctggtcagcgctctcttaggtgtgaaggagtttgaggcgagatggataggttgggctggtgtcaatgtgcccgatgagattggacaaaaggcacttacaaaagctttggctgaaaagaggtgtatcccagtatttcttgatgaagagattgtgcatcaatattacaatggctattgcaataacattctgtggcccctttttcattaccttggacttccacaagaagaccgccttgctaccacacggagtttccaatctcagtttgaagcttatcagaaagcaaatcaaatgtttgctgatgttgtaaataagcactatgaagagggtgatgttgtttggtgccatgattaccatcttatgtttcttccacaatgcttaaagaattataaccacaaaatgaaagttggctggtttctgcataccccatttccatcttctgaaattcacaggacattgccatctcgctcagaactcttgcatgctgttcttgcagctgatttggttggttttcacacatacgattatgcacggcattttgtcagtgcatgtacacgcattcttggacttgagggcacacctgaaggggttgagaatcaggggaagctgactcgagttgcagcatttccaataggtatagactcagaacgattcatacgtgcacttgaccttcctcaagtcaaggatcacatcaaaaaattacaagagagatttaatggaagaaaggtaatgttaggtgttgatcgccttgatatgattaaaggaatccctcaaaaaattctagcatttgaaaaatttttggaagaaaatcctggttggcatgataaagttgttctgcttcaaattgccgtgccgacaagaacagatgttcctgagtatcaaaagcttactagccaggtccatgaaattgttggtcgcatcaatggcagatttggaacactgactgctgttcccatacatcacctggatcgctctcttgattttcatgcactgtgtgctttgtatgctattaccgatgtagcacttgtcacatctttgagggatggaatgaatcttgtaagttacgaatttgtggcctgtcaagataaaaagaaaggggttctcattctcagtgaatttgctggtgctgcacagtcacttggtgctggggctattcttgttaacccttggaacatcacagaagttgctactgcaatttccaaggctctgaatatgccatcggcagaacgcgagaagagacataagcataactatgaacatgtaaaaactcacactgctcaggaatgggcagaaacttttgtaagtgaactaaatgatactgttgtcgaggcacagataaggacaaatcaagttccaccacggctcccaacagagactgcagttgaatgttatttgcagtcaaataatcggttgcttattttgggtttcaatggaaccttaactgagccaattgagagagaaggtgatcggtttaaagaaagggaactcacagtgcatccagaactgaaacagcccttggccgaactttgcagtgacccaaagaccacagttgttgtgcttagtggaagttgtagaacagttctagatgaaaactttaaagaatatgacatctggctggcagcagagaatgggatgtttctaaacccttcaaagggagaatggatgacaacaatgcctgagcaactgaatatggaatgggttgacagtgtgaagcatgtttttgattacttcacggacagaacacctcgatcgtattttgaagaaagggaagcttcacttgtttggagttacagacatgcagatgttgagttcggaagactgcaagcaagggacatgctgcagcatctctggacaggtccaatttctaatgcatctgttgaagttgttcaagggagccgatctgttgaggtgcgagctgctaatgttacaaagggagcagctattgaccgcattctaggtgagatagtccacagtaaatccatgacaacaccaattgattacgttctgtgtataggacattttctgacaaagcaggatgaagatatatacgcgttttttgagccagagctaccacgaagcaaggtaacagaaggagtcaagtttcctgttgagagggtatcgtcatcccaaaataagggacaacggcctgtgtcaaactctgagaagaaaacaaataatcatgtctgccgcctgccacggcggccggctcctgaaaagatctcttggaatgtgcttgacctcaagaaggagaattacttctcgtgcgctgttggacgaacacagaccaatgctcggtatacgcttgcttcaccagatgaagttgttgcatttctcaaggaactccatactttgtctcagagctaa

SEQ ID NO: 462 - protein, 907 aa, Glycine max
MPGNKCNGNSNSFPVPDRHERLMRGRELRKSSRASPDSNSISNVGSEIFEHDLRLREDNNSAAPIVERYLEEVAAAAAAARGERKDGRPFRQRLLVVANRLPVSAIRKGEDSWSLEISAGGLVSALLGVKEFEARWIGWAGVNVPDEIGQKALTKALAEKRCIPVFLDEEIVHQYYNGYCNNILWPLFHYLGLPQEDRLATTRSFQSQFEAYQKANQMFADVVNKHYEEGDVVWCHDYHLMFLPQCLKNYNHKMKVGWFLHTPFPSSEIHRTLPSRSELLHAVLAADLVGFHTYDYARHFVSACTRILGLEGTPEGVENQGKLTRVAAFPIGIDSERFIRALDLPQVKDHIKKLQERFNGRKVMLGVDRLDMIKGIPQKILAFEKFLEENPGWHDKVVLLQIAVPTRTDVPEYQKLTSQVHEIVGRINGRFGTLTAVPIHHLDRSLDFHALCALYAITDVALVTSLRDGMNLVSYEFVACQDKKKGVLILSEFAGAAQSLGAGAILVNPWNITEVATAISKALNMPSAEREKRHKHNYEHVKTHTAQEWAETFVSELNDTVVEAQIRTNQVPPRLPTETAVECYLQSNNRLLILGFNGTLTEPIEREGDRFKERELTVHPELKQPLAELCSDPKTTVVVLSGSCRTVLDENFKEYDIWLAAENGMFLNPSKGEWMTTMPEQLNMEWVDSVKHVFDYFTDRTPRSYFEEREASLVWSYRHADVEFGRLQARDMLQHLWTGPISNASVEVVQGSRSVEVRAANVTKGAAIDRILGEIVHSKSMTTPIDYVLCIGHFLTKQDEDIYAFFEPELPRSKVTEGVKFPVERVSSSQNKGQRPVSNSEKKTNNHVCRLPRRPAPEKISWNVLDLKKENYFSCAVGRTQTNARYTLASPDEVVAFLKELHTLSQS

SEQ ID NO: 463 - DNA, 2586 bp, Gossypium hirsutum
atggcatcaagatcatgtgcaaattttttacacttagcctctgggaatctacttgatattcctcaaactccgagaggtcttcctcgggtaatgactgttcctgggattatctctgacatggactcttgtagcagtaatgatggggattcagatgttgcttcatctgggtgtagagaacgcaaaattatagtggcaaatatgttacctttgcatgctaaaagagatcgtgaaacttcgaaatggcgcttcagctgggatgaggattcacttttactacatctaaaggatgggttttctcctgaaatggaggttgtatacgtaggatctctcaaggttgatatagatgtgaatgaacaggaagaagttgcccaaaagctgttagaagatttcaattgcgtccctacatttgtacctcatgatttgcagaagaagttttatcttggcttctgcaaacagcatttgtggcctctttttcactacatgctgcccatgtgtcctgaccatggtgatcggtttgaccgcattttatggcaggcatatgtttctgctaataaaatatttgctgacaaggttatggaagtaatcaatccagatgatgattatgtctggattcatgattatcatttgatggttcttcccacatttttgaggaagcacctgaatagaatcaagcttggttttttcctccacagcccgttcccttcatcagaaatatatcgaacattgcctgttcgggatgaaattctgaggggactactgaattgcgatctaattggttttcatacgttcgattatgcacgacatttcttgtcttgctgcagtagaatgctgggtcttgattatgaatctaaaagagggcatattggtcttgattactttggtcgcacggtttttattaagattctacctgtaggagttcatatgggtagacttgaatcagtcttgaatctttcctctactgctgccagggtcaaagagattcagaaacagtttgaagggaaaaaattgattcttggcatagatgatatggatattttcaaaggcatcagtcttaaattactggctgtggaacagctcttacagcagcacccagacctgcagggtaaaatagtcctggttcagattgtgaatcctgcaaggggctttggaaaggatgtccaggaggctaagaaggagacttatatgactgctaaaaagatcaatgaggtttatggttcccccaattatcagccagtgattttgattgatcgccctgttccccgttatgagaaatcggcctattatgcgctagcagaatgttgcatagtaaatgctgtgagggatgggatgaacctggttccttacaagtatattgtttgtcggcagggaactcctggcatggatgaggcactgggtgtaaagccagaatatccacgaacaagcatgcttgttgtttctgagttcatcggttgctcaccgtctttaagtggagcaattagggtaaatccatgggatatcgatgctgtggctgaggctttaaatacagctattaccatgcccgagtcagagaagcaattgcgacatgagaaacactaccggtatgtcagtactcatgatgtggcatattgggctcgcagctttgtgatggacttggatagagcatgccaggatcactatagtaaacgttgctggggcattggtttgggcctcagtttcagagttgtgtctctttcacctagttttaggaggctagctatcgatcacatttgttcggcatatagacgaacaaatagaagagcaatattcctggactatgatggcactcttgttcctgaagcttccattatcaaaactcctagccctgaggttatctctatcattaagaccctctgtgatgatcctaagaacacagtgtttattgttagtgggagaggaagagcttcgcttagtgattggcttgctccatgtgagaagctggggatagccgctgaacacgggtacttcataagatggagtaaagactctgaatgggaaaccagccctgttggtgctgaccttgaatggaaaaagattgttgaacctgttatgagcttgtatagagaggcaactgatggctccagcatagagaccaaggagagtggtttggtgtggcaccatctagatgcagaccctgacttcggatcatgccaagccaaggaattgttggatcatttggaaagtgttctcgcaaatgaaccagcggttgtccatagaggccagcatattgttgaagttaagccgcagggagtaagcaaagggctggtagcagagaaagttttgtcgagaatggtcaatggtgggaagccacctgatttcgtgatgtgtgttggtgatgataaatccgatgaagatatgtttcagagcatattaacttcagtttctaatccatccttgcctgtggctccggaaatctttgcatgcacagtggggcgaaagcctagcaaagctaggtattacctcgatgacactgcagatgttttaaagttacttaaaggccttgcaactgctacaatttcaaagcctaggtgcctgcctgagattaaggtatctttcgagagtaatgcttga

SEQ ID NO: 464 - protein, 861 aa, Gossypium hirsutum
MASRSCANFLHLASGNLLDIPQTPRGLPRVMTVPGIISDMDSCSSNDGDSDVASSGCRERKIIVANMLPLHAKRDRETSKWRFSWDEDSLLLHLKDGFSPEMEVVYVGSLKVDIDVNEQEEVAQKLLEDFNCVPTFVPHDLQKKFYLGFCKQHLWPLFHYMLPMCPDHGDRFDRILWQAYVSANKIFADKVMEVINPDDDYVWIHDYHLMVLPTFLRKHLNRIKLGFFLHSPFPSSEIYRTLPVRDEILRGLLNCDLIGFHTFDYARHFLSCCSRMLGLDYESKRGHIGLDYFGRTVFIKILPVGVHMGRLESVLNLSSTAARVKEIQKQFEGKKLILGIDDMDIFKGISLKLLAVEQLLQQHPDLQGKIVLVQIVNPARGFGKDVQEAKKETYMTAKKINEVYGSPNYQPVILIDRPVPRYEKSAYYALAECCIVNAVRDGMNLVPYKYIVCRQGTPGMDEALGVKPEYPRTSMLVVSEFIGCSPSLSGAIRVNPWDIDAVAEALNTAITMPESEKQLRHEKHYRYVSTHDVAYWARSFVMDLDRACQDHYSKRCWGIGLGLSFRVVSLSPSFRRLAIDHICSAYRRTNRRAIFLDYDGTLVPEASIIKTPSPEVISIIKTLCDDPKNTVFIVSGRGRASLSDWLAPCEKLGIAAEHGYFIRWSKDSEWETSPVGADLEWKKIVEPVMSLYREATDGSSIETKESGLVWHHLDADPDFGSCQAKELLDHLESVLANEPAVVHRGQHIVEVKPQGVSKGLVAEKVLSRMVNGGKPPDFVMCVGDDKSDEDMFQSILTSVSNPSLPVAPEIFACTVGRKPSKARYYLDDTADVLKLLKGLATATISKPRCLPEIKVSFESNA

SEQ ID NO: 465 - DNA, 1569 bp, Medicago truncatula
atgataaagcatcaaaagcttacgagccaggtgcatgaaattgtaggacgcatcaatggaagattcggaacacttactgctgtcccaatacaccatctggaccgatcacttgactttcatgcattatgtgcactctatgctgttactgatgtagcacttgtaacatcattaagggatggaatgaatcttgtcagctatgaatttgttgcgtgtcaagcttccaagaagggggttctcattttaagtgagtttgcaggtgcagcgcagtctcttggtgctggtgctatcttggtaaatccatggaatatcacagaggttgctgcttctattggttatgctttggacatgccagctgatgaaagggaaaaacggcatcagtttaatttcaagcatgtgacaactcacacgtcacaagaatgggctgcaacttttgttagtgaactgaatgataccattgttgaagctcagcttaggacaagacaagttcctccattacttcccaataaagtggcagttgattgttactcaaaatccaataaccgattaatcatactgggtttcaatgccactcttactgaaccagtggatccttttggaaggggtggtcagattaaagaactagaactaaaagtgcacccagatatgaaggaacctttaaagaagctatctgatgacccaaagacaacagtggttgttctgagtgggagtggtagagctgtcctagacaaaaactttggtgaatacaatatgtggttggcagcagaaaatgggatgtttttgcgacttacttcaagtgaatggatgacaaccatgcctgaaaatttaaacatggattgggttgatagcgtaaagcatgtttttgagtattttactgaaagaaccccgcggtctaattttgagctacgcgagacttcagtaatatggaattataagtatgcagatgttgagtttggaaggcttcaagcaagagaccttcttcagcatctttggacaggcccaatatcaaatgcatctcttgatgttgtccaaggtggtcgatctgtcgaggtccgtgcagttggtgtgtcaaagggagcagctattgatcgtatcctgggagagatagttcatagcaaaggcatgaaggaaccaattgattacgtcctatgcattggccactttctagcaaaggatgaagatgtctataaattttttgagccagagctcccctctgaagtatctccaatggcaaaagctatgcgatcaaattcttgcagaccatcatctctgccaagattttcatccggcaaaaatggtccaaaagcatcccagtacaagaagcaacgttcactgtcaaatatagataggagagaggtcgaccctgcaagtggtgatccttggagaccaacaggtcgtgatagaacatcactacatgaaggttcttctgttcttgatcttaaaggtgacaattacttctcctgttctgttgcacgaaagagatcaagtgcccgctaccttcttaaaacctcacaagatattgtcaatctcttaagtgacctggcggatcgttcttcatctccatcaacttga

SEQ ID NO: 466 - protein, 522 aa, Medicago truncatula
MIKHQKLTSQVHEIVGRINGRFGTLTAVPIHHLDRSLDFHALCALYAVTDVALVTSLRDGMNLVSYEFVACQASKKGVLILSEFAGAAQSLGAGAILVNPWNITEVAASIGYALDMPADEREKRHQFNFKHVTTHTSQEWAATFVSELNDTIVEAQLRTRQVPPLLPNKVAVDCYSKSNNRLIILGFNATLTEPVDPFGRGGQIKELELKVHPDMKEPLKKLSDDPKTTVVVLSGSGRAVLDKNFGEYNMWLAAENGMFLRLTSSEWMTTMPENLNMDWVDSVKHVFEYFTERTPRSNFELRETSVIWNYKYADVEFGRLQARDLLQHLWTGPISNASLDVVQGGRSVEVRAVGVSKGAAIDRILGEIVHSKGMKEPIDYVLCIGHFLAKDEDVYKFFEPELPSEVSPMAKAMRSNSCRPSSLPRFSSGKNGPKASQYKKQRSLSNIDRREVDPASGDPWRPTGRDRTSLHEGSSVLDLKGDNYFSCSVARKRSSARYLLKTSQDIVNLLSDLADRSSSPST

SEQ ID NO: 467 - DNA, 2580 bp, Oryza sativa
atgccgacccccgcgccgtcggcatcgtcctcctcctcctcctgcggcggcggtggcggtggcgccggggccgcgtcgtcctactcctcctccccggacgaccgcatgctccgcggggagtgcggccgccgccaccccttcgcgtcgtcggcggcggtgggggccggttccccggacgccatggacacggactccgcggagccttcctccgcggcgacctccgtcgcggacttcggggcccggtcgccgttctcgccgggggccgcctcgcccgccaacatggacgacgcgggcggcgcgtcggcggcggggcacgcggcgcggccgccgctcgccgggccgcgcagcgggttccgccgcctcggcctccgcgggatgaagcagcgcctcctcgtcgtcgccaaccgcctccccgtctccgccaatcgccgcggcgaggaccagtggtccctggagatcagcgccggcggcctcgtcagcgccctcctcggcgtcaaggacgtggacgcgaagtggatcggatgggcgggcgtcaacgtccccgacgaggtcggccagcgagctctcacccgagcgctcgccgagaagagatgtataccagtgttcctggatgaggaaatcgtgcaccaatactacaacggatactgcaacaacatactctggcctctgtttcactacctgggattgccacaggaggacaggttggcgacgacgaggaatttcgagtcacagttcaacgcgtacaagcgagcaaaccagatgttcgctgatgttgtgtaccagcactacaaggaaggggatgtgatctggtgccatgattaccacctcatgttcctgcccaagtgcctcaaggatcatgacatcaacatgaaggtcgggtggttcctgcacacgccattcccttcttcggagatttaccggacgctgccctcccggtcggagctgcttcgctccgtgctctgtgctgatttagtcggatttcatacatatgattatgcaagacattttgtgagcgcatgtacaagaatacttggactggagggcactcctgagggtgtggaagaccaaggaaggctaaccagagttgctgcgtttcctattgggatagactctgaacgtttcaagcgagcattggagcttccagcagtaaaaagacacatcactgaattaacacaacgttttgatggtcgaaaggtaatgcttggtgttgaccgacttgacatgatcaaaggaattccgcaaaagattttggcctttgaaaagtttctcgaagaaaaccatgaatggaatgataaagtggttctacttcaaattgctgtgccgacaagaactgatgtccctgagtatcaaaagcttacaagtcaggtgcatgaaattgttgggcgcataaatggccgatttggaacactgactgctgttcctattcatcatctggaccgatctcttgatttccatgccttgtgtgccctttatgcagtcactgatgtggcccttgtaacatcgctgagagatggaatgaatcttgtaagctatgaatatgttgcatgccaaggatcaaaaaaaggagttttgatattgagtgagtttgctggggcagcacagtctcttggagccggtgctattttagtaaacccctggaatattactgaagtcgcagactcaatcaagcatgctttgacaatgtcatctgatgagagagaaaagcgacataggcataactatgctcatgtgacaactcacactgcacaagattgggccgaaacttttgtatgtgagttaaatgagacagttgctgaagctcagctgagaacaagacaagttccacctgatctccctagtcaagcagcaattcaacaatatctgcattccaaaaatcggttgctcatattggggttcaattcaacattgactgagccagttgaatcctctgggagaaggggtggtgaccaaatcaaggaaatggagctcaagttgcatcctgagttgaagggccctttgagagccctctgtgaggatgagcatactacagttattgttcttagtggaagtgacaggagcgtccttgatgaaaatttcggagaattcaatatgtggttagcagcagagcatggcatgtttttacgtccaactaatggagagtggatgacaacaatgcctgagcatctgaacatggattgggtagacagtgtaaagaatgtttttgaatactttacagaaagaaccccaaggtctcattttgaacaccgtgagacatcatttgtatggaattacaagtatgctgatgttgagtttggacggctccaagcaagagatatgctgcagcacttgtggacaggtccaatctcaaatgcagcagtcgatgttgttcaaggaagccgatcagttgaagttcggtctgtcggagttacaaagggtgctgcaattgatcgtattctaggagagatagttcatagcaaaagcatgattactccaattgattatgttctatgcattgggcacttcctaggaaaggtaattatgcaattaatttatatgtgcatatccgtttctttcagtgcaaggtgctttttttgtctttga

SEQ ID NO: 468 - protein, 859 aa, Oryza sativa
MPTPAPSASSSSSSCGGGGGGAGAASSYSSSPDDRMLRGECGRRHPFASSAAVGAGSPDAMDTDSAEPSSAATSVADFGARSPFSPGAASPANMDDAGGASAAGHAARPPLAGPRSGFRRLGLRGMKQRLLVVANRLPVSANRRGEDQWSLEISAGGLVSALLGVKDVDAKWIGWAGVNVPDEVGQRALTRALAEKRCIPVFLDEEIVHQYYNGYCNNILWPLFHYLGLPQEDRLATTRNFESQFNAYKRANQMFADVVYQHYKEGDVIWCHDYHLMFLPKCLKDHDINMKVGWFLHTPFPSSEIYRTLPSRSELLRSVLCADLVGFHTYDYARHFVSACTRILGLEGTPEGVEDQGRLTRVAAFPIGIDSERFKRALELPAVKRHITELTQRFDGRKVMLGVDRLDMIKGIPQKILAFEKFLEENHEWNDKVVLLQIAVPTRTDVPEYQKLTSQVHEIVGRINGRFGTLTAVPIHHLDRSLDFHALCALYAVTDVALVTSLRDGMNLVSYEYVACQGSKKGVLILSEFAGAAQSLGAGAILVNPWNITEVADSIKHALTMSSDEREKRHRHNYAHVTTHTAQDWAETFVCELNETVAEAQLRTRQVPPDLPSQAAIQQYLHSKNRLLILGFNSTLTEPVESSGRRGGDQIKEMELKLHPELKGPLRALCEDEHTTVIVLSGSDRSVLDENFGEFNMWLAAEHGMFLRPTNGEWMTTMPEHLNMDWVDSVKNVFEYFTERTPRSHFEHRETSFVWNYKYADVEFGRLQARDMLQHLWTGPISNAAVDVVQGSRSVEVRSVGVTKGAAIDRILGEIVHSKSMITPIDYVLCIGHFLGKVIMQLIYMCISVSFSARCFFCL

SEQ ID NO: 469 - DNA, 2580 bp, Physcomitrella patens
atggacaactacgaaggttctaggaacctgaatgaaaagctccacccaagtaaacaaagattactggtggttgccaatcgccttcctgtttctgcaattcgcctggagggggacaagtgggatttgcagttgagtgccggggggctcgtgagtgcactcttgggtatgcatagtttcgaaacaaggtggattggatggccaggtgtcagtgtgcatgatgagaaagggcgtgcttcgttgacggaggcattagctttgaagggttgcgttccagtgtttctagacgatgatacggtagatcaatattacaatggctactgcaacaatgtgctttggcctctcttccactacattggactgcctcaggcggatcggctcgctgcaaccaggagcttggattcgcaatttcaagcttatcagcacgcaaatagtttgttcgctaagattgttttttcacaatatcaagagggtgatgtggtctggtgtcacgattaccacctcatgtgcctcccacaaaaattgaaggagttaaatcctcacatgaaagtgggatggttcttgcacacaccattcccttcctctgaaatatatcggactttgccactacgttcagagttattgaaggctgtgctcactgcagatctcattggatttcatacttatgactacgcaagacattttgtgagcgcatgtacacgcattttggggctggagggtactccagaaggtgtcgaggaccaaggaaagcttactcgtgttgcagcttttcctataggtatcgatcctgagaggttcatttcagctctagaaacagagcaggtgaagctccatgtgaaggagttgttgcgtttctttgcaggcaggaaggtgatgttgggtgttgatcgtctcgatatgattaaagggattccccagaagctgctcgcatttgagatgtttctggaaaagaatcctcaatggcgcgagaaagtgatgcttgtccaaattgctgtgccaacccgaacagatgttcacgagtatcaacgtttgaccagtcaggtccatgaaatagttggacgtataaatggtcgctttggaacggttactttcgtgcccatcaatcacttggatcgatctttggctttccacgaattgtgtgctttgtatgccagcacagatgtggtgttggtgacttcgttgcgagatgggatgaatcttgttagctatgagtatgttgcctgccagcatatgaagaacactgaaggtgtactcgtattaagtgagtttgcaggagcagcccagtctttaggagctggggctatacttgtgaatccttggaatataagggagatgtacaaagctatcgaagaggctctgacaatgagtgatgaggaaagaaaggaacggcatcgtcacaacttcactcatgttatgacccacacggctcaggcctgggctgttaactttcttgattgcaaagatactaactatacaggttctgcgaatgctagtgagctgaacgacacctacgtggaggctgagcttcgaacgctgaatgaacctccagttttaccagtcgatactgccaaggaaagttttcggaggtgtactaatcgattacttatttttggtttcaattcgaccatcactgctgcagtggaagctccacggcgggatcagataaaggaatccaagttgggtttacacccaggcatgaaagactccctcaagactctttgctctgatcccaacactgacgttgtcatcctcagtggtagcaggctggatgtactggaagaggtctttggagaatatggaatttggctcgcagctgaaaatggaatgtatttgcgtgatcttagtggtaattggatgcccactatggagcatttgaacatggattggaaagaatatgtgcagcgtgtatttgattatttctgccaaagaacgccacgatcttatgtggagaaacgagagacatctttggtttggaattataagtatgctgatgtggattttgggaaggtccaagctcgaaacatgctccaacatctatggacaggtccgatctctaatgcagccgtggatgttgttcaagggcaaaagtcggtggaggttcgacccatcggtgtttcgaagggtgctgcaatcgatcggatcgtatttgaaatcttacgtaacaaatatcctaatggttcatacacatcaaatattcagtttgactttgtcatgtgcgtgggccattttttgagcaaggatgaagatgtgtttgcctatttcgatccggagatagtactccatagagattatcacggcagtatctattcgtactctgatagagacctgatgggagacctggtgaatgtgtcgtcagatacgtacatctcctgtgcagtgggaaagaaacgttcatccgcccgatattatttggatacagtaaacgaggtcgtctcatttgttaagtcacttgctgatgcgtgtccctgtgaattggattcagaagatcaatcggtgttatcggtcggttcagggtctggtcctcatgtgtccccatgttctgctgattcgttgcctaacggaatccctaggcatgatttatga

SEQ ID NO: 470 - protein, 859 aa, Physcomitrella patens
MDNYEGSRNLNEKLHPSKQRLLVVANRLPVSAIRLEGDKWDLQLSAGGLVSALLGMHSFETRWIGWPGVSVHDEKGRASLTEALALKGCVPVFLDDDTVDQYYNGYCNNVLWPLFHYIGLPQADRLAATRSLDSQFQAYQHANSLFAKIVFSQYQEGDVVWCHDYHLMCLPQKLKELNPHMKVGWFLHTPFPSSEIYRTLPLRSELLKAVLTADLIGFHTYDYARHFVSACTRILGLEGTPEGVEDQGKLTRVAAFPIGIDPERFISALETEQVKLHVKELLRFFAGRKVMLGVDRLDMIKGIPQKLLAFEMFLEKNPQWREKVMLVQIAVPTRTDVHEYQRLTSQVHEIVGRINGRFGTVTFVPINHLDRSLAFHELCALYASTDVVLVTSLRDGMNLVSYEYVACQHMKNTEGVLVLSEFAGAAQSLGAGAILVNPWNIREMYKAIEEALTMSDEERKERHRHNFTHVMTHTAQAWAVNFLDCKDTNYTGSANASELNDTYVEAELRTLNEPPVLPVDTAKESFRRCTNRLLIFGFNSTITAAVEAPRRDQIKESKLGLHPGMKDSLKTLCSDPNTDVVILSGSRLDVLEEVFGEYGIWLAAENGMYLRDLSGNWMPTMEHLNMDWKEYVQRVFDYFCQRTPRSYVEKRETSLVWNYKYADVDFGKVQARNMLQHLWTGPISNAAVDVVQGQKSVEVRPIGVSKGAAIDRIVFEILRNKYPNGSYTSNIQFDFVMCVGHFLSKDEDVFAYFDPEIVLHRDYHGSIYSYSDRDLMGDLVNVSSDTYISCAVGKKRSSARYYLDTVNEVVSFVKSLADACPCELDSEDQSVLSVGSGSGPHVSPCSADSLPNGIPRHDL

SEQ ID NO: 471 - DNA, 2769 bp, Populus trichocarpa
atgcctggaaaccagtacaacggtaactctacccttaactcaggtcgtgtcggacggctcttaaagataagagagcaaaggagaagtatcaggtctgcctattcaaatgaggtaactgataaccatagaggaactgaagcatgtgaaaatgatttgcgcacgcgagaaggtgacagcttaaacaattcatttatcgaacaatacttggaaggtgctatcgcagagggatatgaaaagctggatgtcaggcctttaaggcaacggctgttggtggtagctaatagactacctgtatctgcagttagaagaggtgaagactcatggtctttggagataagtgctgggggcttagtcactgctcttctaggtgtaaaggagtttgaggcgaaatggattggttgggctggagttaatgtgccagatgaagttggccagaaggcgcttactgaagctttggctgaaaagaggtgtattccggtattccttgacgaagagattgttcatcaatattataatggctactgcaacaatatattgtggcccctctttcattaccttgggcttccacaagaagatcgacttgccacgaccagaagtttccagtctcagtttgctgcatataagaaggcaaaccaaatgtttgctgatgtggtgaatcagcactatgaggagggtgatgttgtctggtgccatgattaccatttgatgtacctcccaaaatgccttaaggaatacaataataatatgaaagttggttggtttctccacacaccctttccttcttctgaaatccataggacgctgccatctcgatcagacctactacgttctgttcttgcagccgatttagttgggtttcacacctatgactatgcaagacattttgttagtgcttgtactcgtattcttgggctagagggcacacctgaaggcgttgaggatcaagggaggctgactcgagttgctgcgtttcccattgggatagactcagatcggttcataagagctcttgaactccctcaagtccaggaacacatcaaagaactgaaggaaagatttgctggccgaaaggtaatgctaggtgttgaccgccttgatatgattaaaggaattccacagaagattcttgcatttgaaaaatttctcgaggagaattccgcctggcgtgataaagttgttctactgcagattgctgtgccaacaagaacagatgttcctgagtatcaaaaacttacaagccaagttcatgaaattgttggacgcattaatggcagatttggaacattaactgctgttccaatacaccacctggatcgctctctcgacttccatgccttgtgtgctttatatgcagttaccgatgttgctcttgtaacttctttaagggatggaatgaatctcgtcagttatgagtttgtagcatgccaagattcgaagaaaggtgtgctcattcttagtgagtttgcaggtgcagcccaatctctaggtgctggagcaatccttgtgaatccttggaacatcactgaagttgctgattcaatacgccaagctctaactatgtcccctgaagaaagagagaagcgacatcgccacaactttgtccatgtgacaacccacactgctcaagaatgggctgaaacttttgtgagtgaactagatgatacagttatcgaggcacaactaaggaccaagcaagtgccacctgcacttccagaagaagatgcaattagtcgttatttgcagtctactaatcgattgctcatactgggattcaatgcaacattgactgagccagcggacactcctgggagaagagctgatcaaattaaagaaatggaacttaaattgcacccagagttaaaagaagcattgacagcactttgcagtgatagaaagacaaccattgttgttctcagtgggagtgaccgaaaaacattagatgataactttggggagtatgacatgtggttggcagcagaacatggaatgtttttgcgacttacaaagggagaatggatgacaacaatgccagaacacttaaatatggaatgggttgacagtgtgaagcatgtttttgagtacttcacagaacgtactccccgatcacattttgaacgctgtgaaacatcacttgtatggaattacaagtatgcagatgttgaatttgggaggcttcaagcaagggatatgttgcaacacctctggacgggcccaatttcaaatgcctctgttgatgtggtccaagggaatcgatcagttgaggttcgagcagttggtgttacaaagggtgctgctattgatcgtatactgggagagattgtccatagtaaatccatgacaacaccaattgattatgtcctatgcattggccattttctgggaaaggatgaagatgtgtacaccttctttgagccagagctcccttctgatggcctagttgctgcaagaacaaagcaaaatgatggaccaaaattacccaatgatagacgaccttctatgaagcttccagccattagaagcgtgtctaaatcatctcaaggtaaggcacagcgacctttactaaatcccgagaagagaacagctaaccacggctgtgggagtgggcgacggccatcagcagaaaagatttcatggaacgtgcttgatctcaagggagataattacttctcctgtgctgttggtcgaactcgcacaaatgctcgctatctacttggatcatcagatgatgtcgtgtccttcctaatgaaattagccaatgcatctacgtga

SEQ ID NO: 472 - protein, 922 aa, Populus trichocarpa
MPGNQYNGNSTLNSGRVGRLLKIREQRRSIRSAYSNEVTDNHRGTEACENDLRTREGDSLNNSFIEQYLEGAIAEGYEKLDVRPLRQRLLVVANRLPVSAVRRGEDSWSLEISAGGLVTALLGVKEFEAKWIGWAGVNVPDEVGQKALTEALAEKRCIPVFLDEEIVHQYYNGYCNNILWPLFHYLGLPQEDRLATTRSFQSQFAAYKKANQMFADVVNQHYEEGDVVWCHDYHLMYLPKCLKEYNNNMKVGWFLHTPFPSSEIHRTLPSRSDLLRSVLAADLVGFHTYDYARHFVSACTRILGLEGTPEGVEDQGRLTRVAAFPIGIDSDRFIRALELPQVQEHIKELKERFAGRKVMLGVDRLDMIKGIPQKILAFEKFLEENSAWRDKVVLLQIAVPTRTDVPEYQKLTSQVHEIVGRINGRFGTLTAVPIHHLDRSLDFHALCALYAVTDVALVTSLRDGMNLVSYEFVACQDSKKGVLILSEFAGAAQSLGAGAILVNPWNITEVADSIRQALTMSPEEREKRHRHNFVHVTTHTAQEWAETFVSELDDTVIEAQLRTKQVPPALPEEDAISRYLQSTNRLLILGFNATLTEPADTPGRRADQIKEMELKLHPELKEALTALCSDRKTTIVVLSGSDRKTLDDNFGEYDMWLAAEHGMFLRLTKGEWMTTMPEHLNMEWVDSVKHVFEYFTERTPRSHFERCETSLVWNYKYADVEFGRLQARDMLQHLWTGPISNASVDVVQGNRSVEVRAVGVTKGAAIDRILGEIVHSKSMTTPIDYVLCIGHFLGKDEDVYTFFEPELPSDGLVAARTKQNDGPKLPNDRRPSMKLPAIRSVSKSSQGKAQRPLLNPEKRTANHGCGSGRRPSAEKISWNVLDLKGDNYFSCAVGRTRTNARYLLGSSDDVVSFLMKLANAST

SEQ ID NO: 473 - DNA, 2781 bp, Solanum lycopersicum
atgccagggaacaagtataccggcaaccaagcggttgctagcactcgattggagaggctattgagagaaagagagcttaggaaaagtagcaaagtttctcactttccaaatgaatctactgataacaataggggaaacgagctctctgaccatgattttcgccaaggagaagctgataatggaggagtttcatatgtcgaacagtacctcgaaggagctgcactagcatataatgaaggatgggagcggcctgatggaaagcccaccagacaacgactcttggttgtggcaaacaggttacctgtctctgcagtaaggagaggcgaggaatcctggtctctagagataagtggtggaggtcttgttagtgctcttcttggtgtgaaggagtttgaggctagatggattggttgggcaggtgtgaatgtgccagatgaggctgggcagagggcacttactaaggcactggcagaaaagaggtgtatccctgtattcctggatgaagaaattgttcatcagtattacaacggttactgcaacaatatattgtggcctcttttccattatcttggacttccgcaagaagaccgccttgcgactaccagaagtttccagtctcagtttgctgcttataagaaagcaaatcaaatgtttgctgatgttgtgaatgaacattacgaagaaggtgatgtggtatggtgtcatgactaccatctcatgttcctgccaaaatgtctcaaggattacaacagccaaatgaaagtcggttggtttctacacacaccctttccatcctcggaaatacacaggacactgccgtctagatcagagctgctccgagcagttcttgctgctgacttggttggttttcatacctatgactatgcaaggcattttgttagtgcatgtactcgtatcctgggacttgaaggaacacctgaaggagtagaagatcaaggtagactgacccgcgttgctgcgtttcctattggtatagattcagaacgatttattcgagcacttgaagttactcaagttcaggaacacataaaagaactaaaagagagatttgctgggagaaaggttatgctaggagttgatcgccttgatatgattaaaggaattccccaaaagatcctggcatttgagaagttccttgaagaaaatccgtactggcgtgataaagtggttttgcttcaaattgctgtgccaacaagaacagatgttcctgaataccaaaaacttaccagtcaagttcatgagattgttggacgcatcaatggtcggtttggaactttgactgcagtgcctattcatcatctggaccgttctcttgactttcatgcattatgtgcactgtatgctgtaactgatgtagcgttggttacctctttaagagatggcatgaacctcgtcagctatgaatttgtagcctgccaagagttgaaaaaaggggtccttattctcagcgaatttgctggtgctgcacaatcgttaggtgctggagcaattctggtgaatccatggaatataacagaggttgctgcttcgattgggcaagctttaaatatgtcagctgaagaaagagaaaaacgccacaggcataactttctgcatgtgactacgcatactgctcaagaatgggctgagacttttgtgagtgaactaaatgatactgttattgaagctcaacagaggataagaaaagttccgccccggcttaacatcagtgatgcaattgagcgctattcgttttccaataatcgactactaatattgggtttcaattctacactgacagaatcggtggatacccctggaagaagaggtggagatcaaatcaaagaaatggaactgaaattgcatcctgagttgaaagaatcattgctcgcgatttgtaacgacccaaagacaacagtcgttgtcctcagtggaagtgatagaaacgtcttagatgataacttcagcgagtacaacatgtggttagcagcagaaaatggaatgtttttacgatctacaaacggtgtatggatgacaactatgccagaacacctaaacatggactgggttgatagtgttaagcacgttttcgagtacttcactgaaaggacaccgagatctcactttgaacaacgtgaaacttcacttgtttggaattacaagtatgcagatgttgaatttggaagattgcaagctagagacatgcttcagcatctctggacaggtccaatatcaaatgcatctgttgatgttgtacaaggactccgctccgttgaggttcgagcagttggtgttacaaagggagcagcaatagatcgtatactgggggagatcgtacacagtaaagccatcgcaacaccaattgattacgttttatgcatagggcattttctggggaaggatgaggatgtatatacattttttgagccagagcttccttctgactgcatcggtatgccaagaagtaaggtcagtgatgcaccaaaggtgcccggggaaaggcgatcagttccaaaactcccttctagtcgaactagctcaaagtcatctcagaataggaacagaccagtttcaaactcggataagaagacttccaatgggcgacggccctcacctgaaaatgtgtcatggaatgtgctggatctgaagaaggagaattacttctcttgtgcagttggaaggactcgtacaaacgctcggtatctgctcagtacgccagacgacgttgttgcttttctaagggaactagctgaagcacctatttcaaatgggacatcatga

SEQ ID NO: 474 - protein, 926 aa, Solanum lycopersicum
MPGNKYTGNQAVASTRLERLLRERELRKSSKVSHFPNESTDNNRGNELSDHDFRQGEADNGGVSYVEQYLEGAALAYNEGWERPDGKPTRQRLLVVANRLPVSAVRRGEESWSLEISGGGLVSALLGVKEFEARWIGWAGVNVPDEAGQRALTKALAEKRCIPVFLDEEIVHQYYNGYCNNILWPLFHYLGLPQEDRLATTRSFQSQFAAYKKANQMFADVVNEHYEEGDVVWCHDYHLMFLPKCLKDYNSQMKVGWFLHTPFPSSEIHRTLPSRSELLRAVLAADLVGFHTYDYARHFVSACTRILGLEGTPEGVEDQGRLTRVAAFPIGIDSERFIRALEVTQVQEHIKELKERFAGRKVMLGVDRLDMIKGIPQKILAFEKFLEENPYWRDKVVLLQIAVPTRTDVPEYQKLTSQVHEIVGRINGRFGTLTAVPIHHLDRSLDFHALCALYAVTDVALVTSLRDGMNLVSYEFVACQELKKGVLILSEFAGAAQSLGAGAILVNPWNITEVAASIGQALNMSAEEREKRHRHNFLHVTTHTAQEWAETFVSELNDTVIEAQQRIRKVPPRLNISDAIERYSFSNNRLLILGFNSTLTESVDTPGRRGGDQIKEMELKLHPELKESLLAICNDPKTTVVVLSGSDRNVLDDNFSEYNMWLAAENGMFLRSTNGVWMTTMPEHLNMDWVDSVKHVFEYFTERTPRSHFEQRETSLVWNYKYADVEFGRLQARDMLQHLWTGPISNASVDVVQGLRSVEVRAVGVTKGAAIDRILGEIVHSKAIATPIDYVLCIGHFLGKDEDVYTFFEPELPSDCIGMPRSKVSDAPKVPGERRSVPKLPSSRTSSKSSQNRNRPVSNSDKKTSNGRRPSPENVSWNVLDLKKENYFSCAVGRTRTNARYLLSTPDDVVAFLRELAEAPISNGTS

SEQ ID NO: 475 - DNA, 2325 bp, Triticum aestivum
atggacttcgtctacatcggcggcctgcgcgacgacatcccggcggaggagcaggacaaggtcgcgctcgagctctacgaccgcttccgctgcgtgcccgccttcctgccggacgacctccgctcccgcttctaccacggcttctgcaagcagcagctgtggccactgttccattacatgctgccactgtcgcccgagctcggcggccgctttgaccgcgacctgtggaaggcctacctgtccgtcaacaagatcttcaccgacaagatcatggaggtgatcaaccccgaggaggacttcgtctgggtgcacgactaccatctcatgctcctgcccaccttcctgcgcaagaaattcaaccgtgtcaggctgggcttcttcctgcacagcccgttcccatcatcggagatctacaagaccctgccggtgcgcgaggaggtgctccgggcgctgctgaatgccgacttgattgggttccacacatttgattatgccaggcatttcctctcatgctgcagcaggatgctgggaatgaaatacgagtcgcagaggggatacattggactggagtattatggacggactgtcactgtcaagatactgccggtggggatacatttgacgcagctgcaggcagtgctcaacctcccggagaccgggctcaaggtcgccgagcttatgaaggagttccctgatcgtcaccgcatcatgatgcttggtgtggatgacatggacatatttaaaggcatcagtctgaagcttctggcatttgaggagctcttgacgcagcatccagagtatcgaggaaaggtggtgctggtacagattgccaatccggcgagggggaagggaaaggatgtgaaggaggtacaggatgagagctatgccatggtgaagcgcatcaatgaggcatttgggcagccagattaccagccagtcatattgatcgacaggccactgcacttctatgagaggatggcatactatgttgttgctgagtgctgcttggtgaccgcggtgagggatggcatgaatcttataccatatgagtacatcattgctaggcaagggaatgagaagattgacaggatcctgggtctcagccctttcacaaggaagaagagcatgcttgtcgtgtcggaattcattggctgctcaccctccctgagtggcgcgattcgggtgaacccttggaacattgagtcggtggccgaggcaatggacaaggccttgcacacaggtgaaggtgagcaggcgctgaggcacgagaagcatcacaaatttgtgagcacacatgatgtcggatactgggcaaacagcttcctgcaggatctggcgaggacttgccaagaccataacaagaggcgctgctggggcataggatttgggctaaggttcagggttgtggcccttgatacgagcttcaagaagctcgcggctgagcagcttgtctcagcctaccggaaggcaagcacgcgcgccattctcttggactatgatggtacgctgatgcctcagtcatcgtttggtaagatgccgagctccaaaacaataaacatgttgaacagcctctgtcgcgatgagaagaacttggtcttaatcgcaagcacaaagacccgggcgaccttaagtgaatggttctcagcatgtgaggacctaggccttgctgctgagcatggctacttcatcaggctggaaagagatgcagaatgggagacatgcggcctgtcaacagacttcagctggaagcaaatcgcggagccggtgatgaagacctacaccgagacaacggacgggtcgatcatcgaggacaaggagacagcaatcgtgtggtgctacgaggacgcggaccatgattttggatcttgccaggccaaggagctccatgatcacctggagagtgtcctctccaacgagccggtatcagtcaaagctgacctgcactatgttgaggtgaagccacagggtgtgagcaagggcctggtggcgaagcggatgctgtcgacaatgcaggagctggggctccagcccgacttcatcctctgcgtcggggacgaccgctccgacgaggacatgttcgaggtgatcaccaccgcggtggacggcccctacctgagcccttccgcgacggtcttcgcctgcaccatcggccaaaagcccagcaaggccaagtactacctggatgagcccgccgacatcaagcgcatgatccgggccctcgcgagcgtctctgaccaggagctggcgatggaggagggcgaagaccctccttaccctttcctcgccggcgacggcaccagcagcgacgacacctggctggactga

SEQ ID NO: 476 - protein, 774 aa, Triticum aestivum
MDFVYIGGLRDDIPAEEQDKVALELYDRFRCVPAFLPDDLRSRFYHGFCKQQLWPLFHYMLPLSPELGGRFDRDLWKAYLSVNKIFTDKIMEVINPEEDFVWVHDYHLMLLPTFLRKKFNRVRLGFFLHSPFPSSEIYKTLPVREEVLRALLNADLIGFHTFDYARHFLSCCSRMLGMKYESQRGYIGLEYYGRTVTVKILPVGIHLTQLQAVLNLPETGLKVAELMKEFPDRHRIMMLGVDDMDIFKGISLKLLAFEELLTQHPEYRGKVVLVQIANPARGKGKDVKEVQDESYAMVKRINEAFGQPDYQPVILIDRPLHFYERMAYYVVAECCLVTAVRDGMNLIPYEYIIARQGNEKIDRILGLSPFTRKKSMLVVSEFIGCSPSLSGAIRVNPWNIESVAEAMDKALHTGEGEQALRHEKHHKFVSTHDVGYWANSFLQDLARTCQDHNKRRCWGIGFGLRFRVVALDTSFKKLAAEQLVSAYRKASTRAILLDYDGTLMPQSSFGKMPSSKTINMLNSLCRDEKNLVLIASTKTRATLSEWFSACEDLGLAAEHGYFIRLERDAEWETCGLSTDFSWKQIAEPVMKTYTETTDGSIIEDKETAIVWCYEDADHDFGSCQAKELHDHLESVLSNEPVSVKADLHYVEVKPQGVSKGLVAKRMLSTMQELGLQPDFILCVGDDRSDEDMFEVITTAVDGPYLSPSATVFACTIGQKPSKAKYYLDEPADIKRMIRALASVSDQELAMEEGEDPPYPFLAGDGTSSDDTWLD

SEQ ID NO: 477 - DNA, 2742 bp, Zea mays
atgatgtcgcggtcgtacaccaacctgctcgacctcgcggagggcaacttcgcggcgctgggcccggccgccggcgccggcggcagcgggcggcagaggcatgggtcgttcgggctgcggcggatgtcgcgggtgatgacggtgccggggacgctgacggagctcgacggcgaggacgagtcggagccggccgcgaccagcagcgtcgcctccgacgtgccctcgtccgtggcggcggaccgcctcatagtggtctcgaatcagttgcccatcgtcgcgcgccgcaggcccgacggccgagggtggtccttctcgtgggacgatgactcgctcctgctccagctccgcgacggcattcccgacgagatggaggtgctcttcgtcggatcactccgcgccgacgtccccgcagccgagcaggacgcggtatcgcaggcgctgctcgaccgattccgctgcgcgccggtgttcctccctgaccacctcaacgaccggttctaccacggcttctgcaagcgccagctctggcctctgttccactacatgctccccttctcatcgcccgcttccgcgtctgccgccgctacctcttcctccgtcgccacttcgtcacccggcaacggttgcttcgaccgcagcgcttgggaggcatacgtgctcgccaacaagttcttctttgagaaggtcgtcgaggtaatcaacccggaggatgactacgtctgggttcacgactaccatctcatggcgctgcctaccttcctccgccgctgcttcaaccgcctccgcatcggattcttcctccacagccccttcccctcgtccaagatctaccgcaccctccctgttcgggaggagatactcaaggcgctgctcaactgtgacctaattggcttccacacttttgattacgccaggcacttcctctcgtgctgcagtaggatgctgggaattgaataccagtcaaagcgtgggtacattgaattggattactttggccgcactgtcgggatcaaaatcatgccagtgggagttcatatgggtcaattggagttgggtctgcgcttgcctgatagggaatggaggctttctgagcttcaacgccagtttcaggggaaaactgtcttgcttggtgtggatgatatggatatctttaaggggatcaatttgaagcttctcgcctttgagaacatgttgaggacacatcccaagtggcaggggagagcagtgttagtgcagattgctaacccagcccgtggaaggggtaaagatctggaagccatccaggctgagattgaggagagctgccagcggatcaatggagactttggccagtcagggtatagccctgttgttttcatcgatcgtgatgtgtcaagtgttgagaagattgcctattatacgatagcggaatgtgtggtggtgactgctgtgagggatgggatgaacttgacaccgtatgaatacgttgtctgtaggcagggtgcaccaggatctcagtcggtagcagaggtgagtgggccaaagaagagcatgctggttgtgtcagagtttattggctgctcaccgtcactgagcggtgctattagggttaacccatggaatatagaggcaaccgcggaggcgatgaatgaggccatttcaatgccagaacaggaaaaacagttgaggcatgagaaacattaccgttatgtcaggagccatgacgtcgcttattggtcaaagagcttcatcatagacttggaaagggtttgtaaggatcacttcaagaggacttgttggggcatagggttgggttttggtttcagggtggtggccttggaccctcatttcacaaagcttaacatggattcaatcattaatgcttatgagctttcagagagcagggctatattgctcgattatgatggaactctggttccccaaacttccctcaacaaggaacctagtccacaggttttgagcatcatcaataccctttgctcagatagtagaaacatcgtttttcttgtcagtggtcgagacaaagataccttgggaaagtggttctcctcatgtccaagattggggattgcagctgaacatggttacttcttgaggtggtctagagaagaagagtggcaaacatgcactcaggcattggacttcggatggatgcaaatggcgaagccagtgatgaatttatatacagaagcaactgatggatcctacattgaggccaaggaaagtgccttggtgtggcaccatcaggatgctgacctaggctttggatcctcacaggcaaaggagatgcttgatcacctggaaagtgtactagcaaatgaaccagtctctgtcaagagtggccagttcattgttgaagtcaaaccacagggaataagcaaaggaatagttgctgagaggatacttgcatcagtgaaggagagaggaaagcaggctgatttcttattgtgcatcggcgatgataggtctgatgaggacatgtttgaaaatattgctgatatcactgggaggaatttggttgctccaagaacagcactgtttgcgtgcactgtgggacaaaaaccaagcaaagccaaattctatctggatgatacattcgaagtggtcactatgctgagcgcactggcagatgccacaggtcctgagactgattcggctgatgaatctgtcgcatatatctcatcacttgatattggtgacgaacaatcagaatccagtgataaaccagttgaagggtcttag

SEQ ID NO: 478 - protein, 913 aa, Zea mays
MMSRSYTNLLDLAEGNFAALGPAAGAGGSGRQRHGSFGLRRMSRVMTVPGTLTELDGEDESEPAATSSVASDVPSSVAADRLIVVSNQLPIVARRRPDGRGWSFSWDDDSLLLQLRDGIPDEMEVLFVGSLRADVPAAEQDAVSQALLDRFRCAPVFLPDHLNDRFYHGFCKRQLWPLFHYMLPFSSPASASAAATSSSVATSSPGNGCFDRSAWEAYVLANKFFFEKVVEVINPEDDYVWVHDYHLMALPTFLRRCFNRLRIGFFLHSPFPSSKIYRTLPVREEILKALLNCDLIGFHTFDYARHFLSCCSRMLGIEYQSKRGYIELDYFGRTVGIKIMPVGVHMGQLELGLRLPDREWRLSELQRQFQGKTVLLGVDDMDIFKGINLKLLAFENMLRTHPKWQGRAVLVQIANPARGRGKDLEAIQAEIEESCQRINGDFGQSGYSPVVFIDRDVSSVEKIAYYTIAECVVVTAVRDGMNLTPYEYVVCRQGAPGSQSVAEVSGPKKSMLVVSEFIGCSPSLSGAIRVNPWNIEATAEAMNEAISMPEQEKQLRHEKHYRYVRSHDVAYWSKSFIIDLERVCKDHFKRTCWGIGLGFGFRVVALDPHFTKLNMDSIINAYELSESRAILLDYDGTLVPQTSLNKEPSPQVLSIINTLCSDSRNIVFLVSGRDKDTLGKWFSSCPRLGIAAEHGYFLRWSREEEWQTCTQALDFGWMQMAKPVMNLYTEATDGSYIEAKESALVWHHQDADLGFGSSQAKEMLDHLESVLANEPVSVKSGQFIVEVKPQGISKGIVAERILASVKERGKQADFLLCIGDDRSDEDMFENIADITGRNLVAPRTALFACTVGQKPSKAKFYLDDTFEVVTMLSALADATGPETDSADESVAYISSLDIGDEQSESSDKPVEGS

SEQ ID NO: 479 - DNA, 795 bp, Brassica napus
atgatggagtgggataacaatcaaaagcagcaacccaacaaccacaactcctcaaatctccaggggatcgacgttagtggcggcggctccagctcaggaggaatgtacgtgaaagtgatgaccgacgagcagctcgagactctgaggaagcagattgctatctacgccaccatttgtgatcgtctcgttgagatgcacaaaaccctcacttctcaacaagatcttgcaggagggagactgggaggtctatatgtagacccaaccattggtcacaagatgacagctaggcagaggtggactcctacccccgtgcagcttcagattctggagcgtatattcgaccaaggcacgggaacgccgagtaagcaaaagatcaaagacataaccgaagagcttagccagcacggccagatttcggaacaaaacgtctacaattggttccagaaccgacgtgctcgttccaagaggaagcagcatggtggtggtgttggtggttcttctaacaacaacaatggtgagtctgaggtggagactgaggctgagacgttgaatgggaagaggaagatgccagagagtcttcgtgttcttcctaatggaaacaatggcattgggacaacaagaggtactagtcctaggcctgaagatctttgcttccagagccctgagatgagctctgatcttcacttgctaggagtcctatcaaacccaagggatgatcatcttgtaggaaagatgggattgtctgaaagttacaacctctatgatcatgttgaggactatggcatgtcaggctga

SEQ ID NO: 480 - protein, 264 aa, Brassica napus
MMEWDNNQKQQPNNHNSSNLQGIDVSGGGSSSGGMYVKVMTDEQLETLRKQIAIYATICDRLVEMHKTLTSQQDLAGGRLGGLYVDPTIGHKMTARQRWTPTPVQLQILERIFDQGTGTPSKQKIKDITEELSQHGQISEQNVYNWFQNRRARSKRKQHGGGVGGSSNNNNGESEVETEAETLNGKRKMPESLRVLPNGNNGIGTTRGTSPRPEDLCFQSPEMSSDLHLLGVLSNPRDDHLVGKMGLSESYNLYDHVEDYGMSG

SEQ ID NO: 481 - DNA, 1035 bp, Glycine max
atgaaaatttcagaatcaatcttatattttgggactaaatcttttccaaaatatattttcttgattccaaaagaacctaggaatacaaaccctatccttggtctgttccttcattcttattgtctccccgcatcgtacgccgccgacacagcttcgaatcgctgccaagtgctaacaaacgcctctgagtctctgacaccaacgcaactctctctgctcacatgtttgaaggagatggtgaacgtgatggagtggcagaagcagcgttggcaaccgaatgggaacgcggaaatgatgtacgtgaaagtgatgaccgacgaacagctcgagactctgcgcaaacagattgcagtttacgcaaccatctgtgaacaactcatcgaaatgcacaaaaacatctcctcgcaccaagatcttgcagggattaggctggggaatatgtattgtgatccattgttggggtctggtgggcacaaaatagcttcaaggcagcggtggactccgtccgctatgcagcttcagattcttgagcgaatatttgatcaagggactggaacccccaccaaggaaaagatcaaggagatcactaatgagctcagccagcatggccagatttctgagaccaatgtgtataattggttccagaacaggcgtgctcgctccaaaagaaagcagcagaatgtggcacctagtgctaatgctgaatcggaagtggagactgaggttgattctaaggataagaagacaaagccggacgaatttcagtcccctcctagcgtttctgctgtgcctgctgatgataatttaggcttccagaaccatggcagtttgcagtacttgaatccagagtccaacaaaccagattctgtgttcccatctgatgcaagtttaagatctacaagaaatttcaatcatgtgcctgtttttgatgggctgctatcgaactcaaggagtgactatcttactggaaaaatggaagcacctgagaactacgacttataccagccagcaggcgacttcaacatggcaggttga

SEQ ID NO: 482 - protein, 344 aa, Glycine max
MKISESILYFGTKSFPKYIFLIPKEPRNTNPILGLFLHSYCLPASYAADTASNRCQVLTNASESLTPTQLSLLTCLKEMVNVMEWQKQRWQPNGNAEMMYVKVMTDEQLETLRKQIAVYATICEQLIEMHKNISSHQDLAGIRLGNMYCDPLLGSGGHKIASRQRWTPSAMQLQILERIFDQGTGTPTKEKIKEITNELSQHGQISETNVYNWFQNRRARSKRKQQNVAPSANAESEVETEVDSKDKKTKPDEFQSPPSVSAVPADDNLGFQNHGSLQYLNPESNKPDSVFPSDASLRSTRNFNHVPVFDGLLSNSRSDYLTGKMEAPENYDLYQPAGDFNMAG

SEQ ID NO: 483 - DNA, 759 bp, Gossypium hirsutum
atgagtgaaagtttcatgataatggaatgggaagatcaagagaatcaaaaccagagagagattttgaatgtaaatgtgaataatggtggagtaatgtatgtcaaagtgatgaccgatgaacagttggagactctcagagagcaaattgctgtttatgccgccatttgtgagcagctcgttgagatgcataagaacctcactgcccagcaagatctcgcaggtggtaggctggggagcctgtattgtgacccgttaatgacatctgctggtcacaaaattactgctagacagcggtggactccaactccagtgcagcttcagattctggaacgaatctttgatcaggggactggaactccaagcaagcaaaagatcaaagagataacctcagaactgagccagcatggccaaatttctgaaacaaatgtctataactggtttcaaaatagacgggctcggtctaaaaggaagcaactggggtcatcatccaacaatgctgaatcagaactagagacagaagtcgagtcaccgaatgaaaagaagacgaagcccgagaatcttctctctgggcagaaccctgcaccaagggctgaagatctctgtttccagaaccctgagataacctctgaactgcatttcttgggtgtaatgtccaatccaactacattcaacggaggtgaacatctgtctggaaaaatgggaatgcctgggagctacaacatttttgaccaggcaggtgactacggcatggcagggtga

SEQ ID NO: 484 - protein, 252 aa, Gossypium hirsutum
MSESFMIMEWEDQENQNQREILNVNVNNGGVMYVKVMTDEQLETLREQIAVYAAICEQLVEMHKNLTAQQDLAGGRLGSLYCDPLMTSAGHKITARQRWTPTPVQLQILERIFDQGTGTPSKQKIKEITSELSQHGQISETNVYNWFQNRRARSKRKQLGSSSNNAESELETEVESPNEKKTKPENLLSGQNPAPRAEDLCFQNPEITSELHFLGVMSNPTTFNGGEHLSGKMGMPGSYNIFDQAGDYGMAG

SEQ ID NO: 485 - DNA, 681 bp, Medicago truncatula
atgatggaatggcagaaacaacaagtacagaatgggaatgtcgaagcgatgtatgttaaggtgatgactgatgaacaattggaaactttgaggaaacaaattgctgtttatgctaccatttgtgaacaacttgttgagatgcataaaacactctctgctcaacaagatcttgctggggttaggttggggaatttatactgcgactcattgatgacagctggtcacaaaatcacatccagacagaggtggactcctacaccggttcagctccagattcttgagcgtatattcgatcagggaaatggaactccaagcaaagaaaaaatcaaggagattgctactgaactcagccagcatggccaaatttctgaaacgaatgtttataattggttccaaaataggcgtgctagatcgaaaagaaaaatgcaaaatgggggaactagtaacactgaatcagaggtagagactgaggttgattccaaggataagaagacaaaaccagaggaatttcattctcaacaaagtgctgctctaggggatgaaaatttgtgcttccagaaccaagaaaaatgctctgaattgcagtacttgaatcatggttctaacaaaacatatttctgtgtttccatcggatggcggtataagatccacaagaaatttgagtggcgtatctctttatga

SEQ ID NO: 486 - protein, 226 aa, Medicago truncatula
MMEWQKQQVQNGNVEAMYVKVMTDEQLETLRKQIAVYATICEQLVEMHKTLSAQQDLAGVRLGNLYCDSLMTAGHKITSRQRWTPTPVQLQILERIFDQGNGTPSKEKIKEIATELSQHGQISETNVYNWFQNRRARSKRKMQNGGTSNTESEVETEVDSKDKKTKPEEFHSQQSAALGDENLCFQNQEKCSELQYLNHGSNKTYFCVSIGWRYKIHKKFEWRISL

SEQ ID NO: 487 - DNA, 609 bp, Oryza sativa
atggagtgggacaaggccaaggcgtcctccggcgaggcggtggacgacaggggcagaggggaaggagggctcgggtacgtgaaggtgatgacggacgagcagatggaggtgctccggaagcagatctccatctacgccaccatctgcgagcagctcgtcgagatgcaccgcgccctcaccgcgcagcaggactccattgcaggaatgaggcttggtaatctgtactgtgatcctctaatggttcccggaggtcacaagatcacagcaaggcagcgatggacaccaaccccaatgcagttgcagattcttgagaacatctttgaccaaggcaatggaacaccaagcaagcaaaagataaaggacataacagcagagctctcacagcatggccagatctcagagacaaatgtctataactggttccagaacaggcgggcacgatcgaaacggaagcaagctgctttaccaaataataatgcagaatctgaagctgaagcggatgaggagtccccaactgacaaaaaacccaaatcagataggccgcttcaccagaacatagccatgagagatcacaatagcgaaaggatcctcggagatgcaccacgttga

SEQ ID NO: 488 - protein, 202 aa, Oryza sativa
MEWDKAKASSGEAVDDRGRGEGGLGYVKVMTDEQMEVLRKQISIYATICEQLVEMHRALTAQQDSIAGMRLGNLYCDPLMVPGGHKITARQRWTPTPMQLQILENIFDQGNGTPSKQKIKDITAELSQHGQISETNVYNWFQNRRARSKRKQAALPNNNAESEAEADEESPTDKKPKSDRPLHQNIAMRDHNSERILGDAPR

SEQ ID NO: 489 - DNA, 855 bp, Physcomitrella patens
atggaatctgaatctaggttaggtcgaatgatggacatgacacctttggggtcgggattgcaagggcaacctgttcctggtggagctgcgctcggccttgggccttcgttggagaattcgttgccgcaacccatgtacactcgggggtctgggcaggtaatgacagaagagcagctcgaaacattgcgacgacagatttcggtgtatgcaacaatctgtcaacaacttgttgaaatgcacaaagcgagtgtttcacaacaagcatctcttcctggcattctagcaagtggtcagattgtgtcgatggaccatctcactggaacaccccctcacaaatcgacagcaagacagcggtggacccccagccaacatcagctgcaaattttagaaaagttgtttgagcaaggcagtggcacacccaacaaacagcgcattaaagagattactgccgaactcagtcagcatggtgcaatctcggagacaaatgtgtacaactggtttcagaatcgcaaagcccgagccaaaaggaagcagcaattggttaccccaagggatggtgaatcggaagcagatacagatgtagagtcaccaaaggaaaaacgtacaagacaggaaggtgaacaaaatcaggacgaatcagggggtgttggtgatacaaatggtggaggcaactctgatggagctggaaatggggttcctgagcaaagagctgccaactttgaccagcaggatgccgcttcgtctgcgctgctgcattcacaaacagatactaaacctgatatatcatcatttaacaggagtgctgggttcgatcctcataatgtatctcaaggcatccctcccatgatgagttaa

SEQ ID NO: 490 - protein, 284 aa, Physcomitrella patens
MESESRLGRMMDMTPLGSGLQGQPVPGGAALGLGPSLENSLPQPMYTRGSGQVMTEEQLETLRRQISVYATICQQLVEMHKASVSQQASLPGILASGQIVSMDHLTGTPPHKSTARQRWTPSQHQLQILEKLFEQGSGTPNKQRIKEITAELSQHGAISETNVYNWFQNRKARAKRKQQLVTPRDGESEADTDVESPKEKRTRQEGEQNQDESGGVGDTNGGGNSDGAGNGVPEQRAANFDQQDAASSALLHSQTDTKPDISSFNRSAGFDPHNVSQGIPPMMS

SEQ ID NO: 491 - DNA, 747 bp, Populus trichocarpa
atggactgggacaacaatcaagaaaatcaccaggacagtcatcaaaatcaaagagagtgtagaaatgggattaacgggactaatgtgaatgtgaatggtaatggtggaactaatatgttgtatgtgaaagttatgacagatgaacaactggaaactttaaggaagcaaattgctgtttatgctgctatttgtgaacagcttgttgagatgcataaaaccctctctgcccagcaagatcttgcaggaggcaggctggggaatctatactgtgacccattgatggcatctgggggtcacaaaattactgccagacagcggtggactccaacacctgtgcagcttcaaattcttgagcggatctttgatcaaggaaatggaactccaagcaagcaaaagattaaggagataacatctgaactcagtcagcatggacaaatttctgagacaaacgtctataattggttccaaaataggcgtgctcgatcaaaaagaaagcagttagttgcatcatccaacaatgctgaatcagaagtggagacagaagttgattcattaaatgaaaagaagaaaccagaaatatttcacgcccaacagaatcctcctagggctgaagatctgtgcttccaaagccctgagataagctctgaacttcatttcttgggggatgaccacctgacaggaaagatgggagtgccagggaactataatctttacgatcaagcagaggactatggcatggcaggctga

SEQ ID NO: 492 - protein, 248 aa, Populus trichocarpa
MDWDNNQENHQDSHQNQRECRNGINGTNVNVNGNGGTNMLYVKVMTDEQLETLRKQIAVYAAICEQLVEMHKTLSAQQDLAGGRLGNLYCDPLMASGGHKITARQRWTPTPVQLQILERIFDQGNGTPSKQKIKEITSELSQHGQISETNVYNWFQNRRARSKRKQLVASSNNAESEVETEVDSLNEKKKPEIFHAQQNPPRAEDLCFQSPEISSELHFLGDDHLTGKMGVPGNYNLYDQAEDYGMAG

SEQ ID NO: 493 - DNA, 546 bp, Triticum aestivum
  misc_feature (18)..(18): n is a, c, g, or t
  misc_feature (46)..(46): n is a, c, g, or t
  misc_feature (97)..(97): n is a, c, g, or t
atgcaaagacccagctcntacatggccaccagcatctccagctatntcatgccagctgctgcaggtatgagtcttggtaatctgtactgtgatcctntaatggttcatggaggccagaagatcacagcgaggcagcgatggacaccaacccagatgcagctgcagatcctcgagatcgttttcaaccaaggaaatggaacaccaagcaagcagaagataaaagacatcacagcggagctctcgcagcatggccagatctcggagaccaacgtctacaactggttccaaaacagacgtgcacgctcgaagcggaagcaagcagcttcttctctaccaaataacgctgaatccgaagccgagggggatgaggagtccctgaccgacaagaagcctagatcagatgggtcacagcagcagaacatggctgtgagagctcacaaccctgagaggatctcagagatgcaccgccacttcgacgcagcagagcgtgagcaggtccgtggtccaatgatgtatgggtccagcaacgacacctcaaggtcgtag

SEQ ID NO: 494 - protein, 181 aa, Triticum aestivum
  misc_feature (16)..(16): Xaa can be any naturally occurring amino acid
  misc_feature (33)..(33): Xaa can be any naturally occurring amino acid
MQRPSSYMATSISSYXMPAAAGMSLGNLYCDPXMVHGGQKITARQRWTPTQMQLQILEIVFNQGNGTPSKQKIKDITAELSQHGQISETNVYNWFQNRRARSKRKQAASSLPNNAESEAEGDEESLTDKKPRSDGSQQQNMAVRAHNPERISEMHRHFDAAEREQVRGPMMYGSSNDTSRS

SEQ ID NO: 495 - DNA, 822 bp, Zea mays
atggagtgggtggacaggaccaaggcctccgccgccgccgccgcagcggcggcggacgagagggctgggggagcggaagggctcgcgggatacgtcaaggtcatgaccgacgaacagatggaggtgctccgcaagcagatctccatctacgccaccatctgcgagcagcttgtcgagatgcaccgcgccctcaccgagcaccaggacaccattgcaggaattaggtttagtaatctgtactgtgatcctcaaattatccctggaggccacaagatcacagcaaggcaacgatggcaaccaacaccaatgcagctgcagatcttggagaacatctttgaccaaggcaatggaacaccaagcaagcagaggataaaggagataacggcagagctctcgcaccatggccaaatctcggagacaaatgtgtacaactggttccagaacagacgggcacggtcaaagcggaagcaggccgcttctttaccgaacaatgctgaatctgaagctgaggtggacgaggagtctctcaccgataagaagccgaagtcagatcggtcgctccaggacaacaaggctatgggcgctcacaacgctgacaggatatctgggatgcatcacttggacactgatcatgaccaaatcggtggcatgatgtatggatgcaatgacaacggcttgagatcgtctggcagttctggccagatgtccttctacgggaacatcatgccgaatccaagaatcgatcatttcccggggaaggtggagagctcccggagcttctcccatctccaacacggggaaggctttgacatgtttggatga

SEQ ID NO: 496 - protein, 273 aa, Zea mays
MEWVDRTKASAAAAAAAADERAGGAEGLAGYVKVMTDEQMEVLRKQISIYATICEQLVEMHRALTEHQDTIAGIRFSNLYCDPQIIPGGHKITARQRWQPTPMQLQILENIFDQGNGTPSKQRIKEITAELSHHGQISETNVYNWFQNRRARSKRKQAASLPNNAESEAEVDEESLTDKKPKSDRSLQDNKAMGAHNADRISGMHHLDTDHDQIGGMMYGCNDNGLRSSGSSGQMSFYGNIMPNPRIDHFPGKVESSRSFSHLQHGEGFDMFG

SEQ ID NO: 497 - DNA, 1542 bp, Brassica napus
atgatgatgttgcgcgtgtgtccgtcgtctctcttctatctccgaccacttcatctctccacttcctctgcgaaattccctttttgcccctctattcgccgagaattacgattagtcccttcccgatcttcttcttcttcgttccgtcggatggaatcttctccggcttcggaaacggattccttaggggaagatatgcagaatcaaactgatgaaggtgataagatcaaaaggaagctcgaagagtttaactgggaccactcctttgttaatgagctgcctggtgatccgagaagcgatgttatctcgcgtaaggtatttcatgcttgctattcaaaagtttccccgtcagtacaagtagatgatcctcagcttgtagcatggtctgattctgttgcggagctcttggatctacatcctaaagaatttgaaaggcttgatttccctctcctactctctggtgctaaacctttgcctggagcaatgccttatgctcaatgctacggaggccaccagtttggcaggtgggctggacagctaggcgacggtcgcgccattactctcggagaagttctgaactccaaaggcgaaagatgggagcttcagctcaaaggcgctggtagaactccttacagccgtttttcagatggcctcgcagtgcttcgtagtagcatcagggagttcctctgcagtgaagccatgcattgtcttggaatccccaccactcgcgccctttgtctcctcacgacaggtcaaggtgtcattcgcgacatgttttatgatggcaatgcgaaggaggaacctggtgctatcgtttgcagggtttctcagtcatttatccgcttcggctcgtaccaaatacatgcttctagaggaaaagaggaccttgagattgttgggaagctagcagactatgccattagacatcatttcccacgtatagagaagagcatgaacagaagtgatggcttatctttcaaaaccggtgatgatgatgatgattctgttttggatctaacatcaaacaagtatgcagcatgggttgttgaagttgcggagcgtacagctactttatttgcaagatggcaaggtgtaggattcacacatggagtgctcaacactgacaacatgagcattttgggtcaaaccattgactatggcccgtttgggttcttagatgcttttgatccaagttacaccccaaacacaacagacctccctggaagaagatactgttttgctaatcagcctgacatcggcttgtggaatattgctcaatttgctgaggctctggctgctgctcagctgataaatgaaaaggtggctaattacgccatggagaggtacggtgataagttcatggatgagtatgaagccataatgacaaagaagcttggtctttcgaagtacaacaaggagatgattagtgaacttctgaacaacatggctgttgataaagtcgattacacaaacttcttccggcttctttcgaatgtaaaagcagaccccaacacatctgatgatgagttattaaacccttga

SEQ ID NO: 498 - protein, 513 aa, Brassica napus
MMMLRVCPSSLFYLRPLHLSTSSAKFPFCPSIRRELRLVPSRSSSSSFRRMESSPASETDSLGEDMQNQTDEGDKIKRKLEEFNWDHSFVNELPGDPRSDVISRKVFHACYSKVSPSVQVDDPQLVAWSDSVAELLDLHPKEFERLDFPLLLSGAKPLPGAMPYAQCYGGHQFGRWAGQLGDGRAITLGEVLNSKGERWELQLKGAGRTPYSRFSDGLAVLRSSIREFLCSEAMHCLGIPTTRALCLLTTGQGVIRDMFYDGNAKEEPGAIVCRVSQSFIRFGSYQIHASRGKEDLEIVGKLADYAIRHHFPRIEKSMNRSDGLSFKTGDDDDDSVLDLTSNKYAAWVVEVAERTATLFARWQGVGFTHGVLNTDNMSILGQTIDYGPFGFLDAFDPSYTPNTTDLPGRRYCFANQPDIGLWNIAQFAEALAAAQLINEKVANYAMERYGDKFMDEYEAIMTKKLGLSKYNKEMISELLNNMAVDKVDYTNFFRLLSNVKADPNTSDDELLNP

SEQ ID NO: 499 - DNA, 1773 bp, Glycine max
atgagatatgagatgggagtctccattctcacccgtttccatttctctctccctctcccacgcgccaccgccagaaagaggattttccatttctgccctccgattgcatgccgctcatccatggatcagtcttctggcctgaatctggaagatctgaaatgggaccattccttcgtcagagaattgcccggcgatccccgccgcgactcctttccccgtgaggttctgcatgcttgttacacccaagtctctccttctgttcaagtacacaatccccaacttgtagccttctcccaaccagttgccgacctacttgatctcgaccataaagaatttcagaggccagattttccccttttcttctctggtgccacacctttagttggagcgttgccttatgctcagtgctatggcgggcatcaatttggtatgtgggctgggcagctgggtgatggcagggcaatgactctaggggagatactgaattctaactctgaaaggtgggaacttcaacttaaaggagctggcaagactccttacagtcgctttgccgatggccttgccgtcctccgcagcagcgtcagggagttcctttgcagtgaggcaatgcaccaccttggtataccaacaactcgtgcactttctcttgttaccaccggcaacctcgtcacccgtgacatgttttatgacggcaatccaaaggaagaacctggcgcaattgtttgcagagttgcccaatcttttctgcggtttgggtcataccaaatacatgcctccagaagtgatgaggacctaggccttgttcgtgttttggcagactatgctatcaggcaccactttcctcatattcaaaatatgagcaagagtgatagcttatctttctgcactggtgatgaagatcattctgttgtagatctcacttcaaataagtatgcagcatgggtggtggagattgctgagcgtactgcttccctgattgctagatggcagggggttggtttcactcatggcgtgctgaacacggataacatgagcattttgggtcttacaatagattatggcccatttggatttttggatgcttttgatcctaaatttaccccaaatactacagatcttccaggtcgaagatactgttttgcaaaccagcctgacattggtttgtggaatattgcacagttcacaacaacactacaagctgctcatttaataaatgaaaaagaggccaactatgctatggaaagatatggaacgagatttatggatgattatcaggttacaatgaccaaaaagcttggcctccctaagtataataagcagatgattaataaacttcttagcaatatggctgttgacaaagttgattacacaaacttctttcgtacgctttcaaatgttaaagcagacataaacattccagatgatgagctgttagtcccactaaagtctgtactgttagatattggtaaagagcgtaaggaagcatggaccagttggttgaaagcttatatacatgaggtctctaccagtgggatacctgatgacgaaaggaagatctcgatggattcagtgaatcctaaatatatactgaggaactatctctgccagactgcaattgatgctgcagaaataggtgattttggagaggttcgcagcctgctcaaattagtggagcatccgtatgatgagcaaccaggaatggaaaaatatgctcgcttgcccccagcttgggcatatcgaccaggtgtatgcatgctttcttgttcttcatga

SEQ ID NO: 500 - protein, 590 aa, Glycine max
MRYEMGVSILTRFHFSLPLPRATARKRIFHFCPPIACRSSMDQSSGLNLEDLKWDHSFVRELPGDPRRDSFPREVLHACYTQVSPSVQVHNPQLVAFSQPVADLLDLDHKEFQRPDFPLFFSGATPLVGALPYAQCYGGHQFGMWAGQLGDGRAMTLGEILNSNSERWELQLKGAGKTPYSRFADGLAVLRSSVREFLCSEAMHHLGIPTTRALSLVTTGNLVTRDMFYDGNPKEEPGAIVCRVAQSFLRFGSYQIHASRSDEDLGLVRVLADYAIRHHFPHIQNMSKSDSLSFCTGDEDHSVVDLTSNKYAAWVVEIAERTASLIARWQGVGFTHGVLNTDNMSILGLTIDYGPFGFLDAFDPKFTPNTTDLPGRRYCFANQPDIGLWNIAQFTTTLQAAHLINEKEANYAMERYGTRFMDDYQVTMTKKLGLPKYNKQMINKLLSNMAVDKVDYTNFFRTLSNVKADINIPDDELLVPLKSVLLDIGKERKEAWTSWLKAYIHEVSTSGIPDDERKISMDSVNPKYILRNYLCQTAIDAAEIGDFGEVRSLLKLVEHPYDEQPGMEKYARLPPAWAYRPGVCMLSCSS

SEQ ID NO: 501 - DNA, 1935 bp, Gossypium hirsutum
atgagatttcatttctctccaaagacaccgctcttctcactctcttcttcctctatcacttccctttgcctccgtcctttccttccttctgccactaaatcccctttttacccttccctcgcatgccacgtgtccaccggcggcaaccttcgcatggactcgacttcaccggatccctcctcttcctcctccgtctccgttgactccgtcgccgacggtttgaaaaaccaaagcttaagagaacatgatatcagtaataataataatatgaacaatgaaaataagaagaataatggtaaattgagccttgaagatcttaattgggaccattcattcgttagagaactgcctggtgaccctataagcgattcaattccacgtcaggttttccatgcatgttatacaaaagttttgccgtcagctgaagtagagaatcctaagcttgttgcctggtcagattcagtggctgatttgcttgatttggatcccaaagaatttgaaagaccagattttccccttaaattttctggggcctctcccttggcaggagcggtgccatatgctcaatgttatggaggacatcagtttggcacatgggctggtcaactgggtgacggccgtgccattactcttggggagataatcaattcgaaattagaaaggtgggaactgcagcttaaaggagctgggaagacgccatacagtcgatttgcggatgggcttgcagttttacggagtagcatccgtgaatatctttgcagtgaagcaatgcattttctaggaattccaactactcgcgctctttgtcttgtgactacaggaaaatttgtaactcgggacatgttttatgatggcaatccaaaggatgagcctggtgcagttgtttgcagagtttcccagtcctttctgcggtttggttcattccaaatacatgcttcaaggggaggagaggaccttggtattgtacgttcgttggcagactatgccatcagacatcatttccctcacattgagaacatgagcaaaagtgagagcttgtcttttagcactggtgacaatgatcaatcagttgtggatttgacttcaaacaagtatgcagcatggacagtggagattgctgagcgtactgcctctttggttgctagatggcagggagttggctttactcatggtgtgctgaacacggacaacatgagtattttaggtctcaccattgattatggtccttttggatttttggatgcttttgatccgagttacacaccaaatgttacagatcttccagggagaagatactgttttgcaaatcagcctgatattggcttatggaatattgcacaatttgcctcaactttgatgactgccaacttgataagtgatcaagaagcaaattatgcgatggaaaggtatgggacaaaatttatggacgattatcaagcaatactgagccaaaagcttggcctccaaaaatacaataaacagcttgtcaataaacttcttagtaatttggctgttgataaagtggattacacgaacttctttcgggcactttccaatatcaaagcagatcctagcattccaggtgatgagttgttggtgccattgaaagctgttctgctagacatgggcaaggaacgcaaggaggcgtggactagttgggtacaaacctacattcaagagctggttgcgagtggcgtctcagatgaggagaggaaagcttcaatgaactcagttaaccctaaatatgttctcaggaactacttatgtcagagcgctatcgatgcagctgaaatgggtgacttggaagaagtccgaaggctccttaaagtaatggagcgaccatatgatgaacaaccgggaatggaaaaatatgctcatttgcctccagcatgggcttatcggcctggtgtgtgcatgctatcctgttcgtcatga

SEQ ID NO: 502 - protein, 644 aa, Gossypium hirsutum
MRFHFSPKTPLFSLSSSSITSLCLRPFLPSATKSPFYPSLACHVSTGGNLRMDSTSPDPSSSSSVSVDSVADGLKNQSLREHDISNNNNMNNENKKNNGKLSLEDLNWDHSFVRELPGDPISDSIPRQVFHACYTKVLPSAEVENPKLVAWSDSVADLLDLDPKEFERPDFPLKFSGASPLAGAVPYAQCYGGHQFGTWAGQLGDGRAITLGEIINSKLERWELQLKGAGKTPYSRFADGLAVLRSSIREYLCSEAMHFLGIPTTRALCLVTTGKFVTRDMFYDGNPKDEPGAVVCRVSQSFLRFGSFQIHASRGGEDLGIVRSLADYAIRHHFPHIENMSKSESLSFSTGDNDQSVVDLTSNKYAAWTVEIAERTASLVARWQGVGFTHGVLNTDNMSILGLTIDYGPFGFLDAFDPSYTPNVTDLPGRRYCFANQPDIGLWNIAQFASTLMTANLISDQEANYAMERYGTKFMDDYQAILSQKLGLQKYNKQLVNKLLSNLAVDKVDYTNFFRALSNIKADPSIPGDELLVPLKAVLLDMGKERKEAWTSWVQTYIQELVASGVSDEERKASMNSVNPKYVLRNYLCQSAIDAAEMGDLEEVRRLLKVMERPYDEQPGMEKYAHLPPAWAYRPGVCMLSCSS

SEQ ID NO: 503 - DNA, 2367 bp, Medicago truncatula
atgatggtactattaactactagtagtatttgtttccctcgtctgttgtcgttgtatccaaactcactcatccgacgcggcggtggcataaggaaattccatttataccctgttagatgctgcagaatgatgatggattcaacagagaagggattgtcagcaccgttgcttgactctgtaactcaagaatttaagaatcaaagccttattcagaagaagaaacgcgaacttgaagatctgaattgggataattcctttgttagagacttaccctctgatccaagaaccgatccctttccaagagaggtattgcatgcttgctatacaaaagtatcaccatcagtttcagtagatgatccacaactcgttgtatggtctgaatccgttgccgaactacttgacttagataataacgaatttcaaagacctgattttccccttttcttctctggtgcatcaccttttgttggtgccttcccttatgctcaatgctatggtggacatcaatttggtatgtgggctggccagttgggtgatggtagagcaatcactcttggggagatactcaattctaactctcaaaggtgggagctacagcttaaaggtgctgggaagactccttacagtcgctttgccgatggtcttgctgtgctacgtagcagcgtcagagagttcctttgcagtgaagcaatgcatcatctcgggattccaacaacccgtgctctttctcttgtcaccactggaaagttggttactcgagatatgttctacgatgggaatccaaaggaagaacagggtgcaatcgtttgtagagttgctcaatcttttctgcgttttgggtcataccaactacatgcctccagaggtagtaatgaggacctggagattgttcgtgttttggcagactatgctattaaacaccactttcctcatattgaaaacatgagtaagagtgagagcttatctttcagcacgggtgatgaagatcattcagtcgtggatcttacatcaaacaagtatgcagcatgggcggtagagattgctgagcgtactgcttccatgattgctagatggcagggggttggtttcactcatggtgtgatgaacacggataacatgagcattttgggtcttactattgattatggtccatttgggtttttggatgcttttgatcctaaatttaccccaaataccacagaccttccaggtagaagatactgttttgcaaaccagcctgacattggtttgtggaatcttgcacagtttacaacaacactgtcagctgctcatttgataaatgacaaagaggctaactatgctttggaaagatatggaacaaaatttatggatgattatcaagatataatgaccaaaaagcttggcctccctaagtataataaacagctgattggtaaacttcttactaatatggctgttgacaaagttgattatacaaacttctttcgcacactctcaaatattaaagcggacacaagcattccagatgatgaattgcctatatggtccacatgggcggtagagattgctgagcgtactgcttccatgattgctagatggcagggggttggtttcactcatggtgtgatgaacacggataacatgagcattttgggtcttactattgattatggtccatttgggtttttggatgcttttgatcctaaatttaccccaaataccacagaccttccaggtagaagatactgttttgcaaaccagcctgacattggtttgtggaatcttgcacagtttacaacaacactgtcagctgctcatttgataaatgacaaagaggctaactatgctttggaaagatatggaacaaaatttatggatgattatcaagatataatgaccaaaaagcttggcctccctaagtataataaacagctgattggtaaacttcttactaatatggctgttgacaaagttgattatacaaacttctttcgcacactctcaaatattaaagcggacacaagcattccagatgatgaattgttagtgccattaaagtcagtgctattagatattggtcaagagcgtaaagaagcgtggacaagttggttgaaaacctatatacacgagctctctacaagtggcatttctgatgatcagaggaagacctccatgaatatggtaaatcctaaatatattctcaggaactatctttgccagactgcaattgatgctgcagaaatcggtgattttggagaagttcgtaggttacttaaattagtggaacatccttttgatgagcagccaggaatggaaaagtatgctcgcttacccccagcatgggcatatcgaccaggtgtatgcatgctttcttgttcctcatga

SEQ ID NO: 504 - protein, 788 aa, Medicago truncatula
MMVLLTTSSICFPRLLSLYPNSLIRRGGGIRKFHLYPVRCCRMMMDSTEKGLSAPLLDSVTQEFKNQSLIQKKKRELEDLNWDNSFVRDLPSDPRTDPFPREVLHACYTKVSPSVSVDDPQLVVWSESVAELLDLDNNEFQRPDFPLFFSGASPFVGAFPYAQCYGGHQFGMWAGQLGDGRAITLGEILNSNSQRWELQLKGAGKTPYSRFADGLAVLRSSVREFLCSEAMHHLGIPTTRALSLVTTGKLVTRDMFYDGNPKEEQGAIVCRVAQSFLRFGSYQLHASRGSNEDLEIVRVLADYAIKHHFPHIENMSKSESLSFSTGDEDHSVVDLTSNKYAAWAVEIAERTASMIARWQGVGFTHGVMNTDNMSILGLTIDYGPFGFLDAFDPKFTPNTTDLPGRRYCFANQPDIGLWNLAQFTTTLSAAHLINDKEANYALERYGTKFMDDYQDIMTKKLGLPKYNKQLIGKLLTNMAVDKVDYTNFFRTLSNIKADTSIPDDELPIWSTWAVEIAERTASMIARWQGVGFTHGVMNTDNMSILGLTIDYGPFGFLDAFDPKFTPNTTDLPGRRYCFANQPDIGLWNLAQFTTTLSAAHLINDKEANYALERYGTKFMDDYQDIMTKKLGLPKYNKQLIGKLLTNMAVDKVDYTNFFRTLSNIKADTSIPDDELLVPLKSVLLDIGQERKEAWTSWLKTYIHELSTSGISDDQRKTSMNMVNPKYILRNYLCQTAIDAAEIGDFGEVRRLLKLVEHPFDEQPGMEKYARLPPAWAYRPGVCMLSCSS

SEQ ID NO: 505 - DNA, 1881 bp, Oryza sativa
atgcccccacacctctcctcctccctcttctcctcctcccctctccccaccaccctcctctcctccctcacccgccgcgcccgcgccctcctccccctccccctccccctccccgccgcctccacccgccgccgcctccctctccgccgcggcccgctgctgacgcgtggcatcatggcctccgccgccgcagaggcaccggccccgtcgccctcgcccaccgccgccgcgaacagccgaccgcggcgggtgctggaggagctctcctgggacgactccttcgtccgcgagctccccggcgacccccgatccgacgccatcccccgcgaggtgcttcacgcttgttacacaaaggtgtcaccctcagcgcccgtggacaaccctaagctggtggcgtggtcccagtccgtggctgacatcctcgatctggatcacaaagagtttgaaagacctgattttcctcagctgttctcaggagcaaatcctttggttgggagttcaccttatgcccagtgctatggtggacaccagtttggttcatgggctggtcagttgggcgacggacgagcaataactcttggagaggttatcaactctcgaggtgagagatgggagttgcagctcaagggctgtggaaagactccatacagccgatttgcagatggccttgctgtcctccgcagcagcattcgtgaattcctatgcagtgaagctatgcatggcctaggcatccctacaactcgtgctctttgtctagttgaaactggcaaatctgttgttcgagatatgttctatgatggcaattcaaaggaggaaccaggtgccattgtatgccgtgtagcaccatcctttttgcgttttggttcatatcagatacatgctacaagggacaaagaggaccttgaaattgttcgtcatttggcagactacacaatacgtcatcactacccacatctcgaaaatattaaaaagagtgaaggtttatcttttgaagcagctataggggactctccagcgatagatcttacttcgaacaaatatgcagcctgggcagttgaggttgcagagcgcactgctttcttgatagcaaggtggcaaggtgttggttttacccatggtgtgctcaacacggataatatgagtgtattaggactaactattgactatggaccctttggctttttggatgcttttgatcctagctatactccaaatacaacagacctccctgggaagagatactgttttgcaaatcaacctgatgttggcttgtggaatattgctcagtttacctcaccattgacagctgccgaacttatcagcaaagatgaggcaaattatgtgatggagaggtacgggacaaagtttatggatgagtatcaatccataatgaccaggaaacttggtctacccaagtataataagcagctaataggcaagctgcttaacaacctggctgttgataaggtcgattatacaaactttttccgtcttctttcaaatgtcaaagcagaccataacattccagagaaggagctacttgttccacttaaagctgcactcctagatattggaccagaaagaaaggaagcatggattagttgggtacaaacttacattgaagagttggtttcaagtggcgttcctgacgaagaaaggaaagctgccatgaactctgttaatccaaagtatgttcttcggaactatctctgccagactgcaattgacgcagctgagcaaggtgattatgatgaagttcgtcggttattgaaagttatggaacatccatatgatgagcagccaggaatggagaaatatgcccggttgccaccagcctgggcatacaggccaggagtgtgcatgctgtcctgctcatcatga

SEQ ID NO: 506 - protein, 626 aa, Oryza sativa
MPPHLSSSLFSSSPLPTTLLSSLTRRARALLPLPLPLPAASTRRRLPLRRGPLLTRGIMASAAAEAPAPSPSPTAAANSRPRRVLEELSWDDSFVRELPGDPRSDAIPREVLHACYTKVSPSAPVDNPKLVAWSQSVADILDLDHKEFERPDFPQLFSGANPLVGSSPYAQCYGGHQFGSWAGQLGDGRAITLGEVINSRGERWELQLKGCGKTPYSRFADGLAVLRSSIREFLCSEAMHGLGIPTTRALCLVETGKSVVRDMFYDGNSKEEPGAIVCRVAPSFLRFGSYQIHATRDKEDLEIVRHLADYTIRHHYPHLENIKKSEGLSFEAAIGDSPAIDLTSNKYAAWAVEVAERTAFLIARWQGVGFTHGVLNTDNMSVLGLTIDYGPFGFLDAFDPSYTPNTTDLPGKRYCFANQPDVGLWNIAQFTSPLTAAELISKDEANYVMERYGTKFMDEYQSIMTRKLGLPKYNKQLIGKLLNNLAVDKVDYTNFFRLLSNVKADHNIPEKELLVPLKAALLDIGPERKEAWISWVQTYIEELVSSGVPDEERKAAMNSVNPKYVLRNYLCQTAIDAAEQGDYDEVRRLLKVMEHPYDEQPGMEKYARLPPAWAYRPGVCMLSCSS

SEQ ID NO: 507 - DNA, 2109 bp, Physcomitrella patens
atggcatcttcattccgagcagcctcgcactgcatccccgtctctgctcccgcttctgcgtttccaacgaaccccttcttgttgcgttcggcgcccatttggtctggtttcggtggccttagggttggcgttgagaatggtgggagtgaggcggtgcatcgccctccacatgctggatgtggattaggcgtgagggctggagctggtcgagtcgatagaggaggaggccgtgaagttgtgtatggtttgttaggtcgtcgtgcgggtgagagcaggaggggaaaagctggtgcagcgttgctgcgggatttcggttcgtcgcgggggcgtgtcttgactgctgccatgacggataatatgaagaatttgaacctggatgacgacaagtctgtcaatggtgacgtcgccgaaaaggtggataagtctgaagaaatcggagcttcaggcagcttgggaaggaaaaagttggaggacttaatctgggatcattcatttgtgcgagaacttcctggcgataaacgaagtgatggtccaacacgtcaggtgctacacgcatgctactcgaaggtcactccttcagtgcgcgtaaaaaacccggagctggtttcttggtcacggcatgttgctgatctgctggatcttgattataaagaatttgaacgaccagacttccctcttcttttcactggagcttctcaattgaagggcggcttagcttatgcacagtgctacggagggcatcaatttggtgtgtgggctggacagttgggagatggacgtgcaattacgttgggagaaatattgaactcaaaagggcagaggtgggagttgcagttgaaaggagccggtaaaacaccatacagccgtactgctgatgggcttgcagtacttagaagcagcgttcgtgagtacctttgcagtgaagctatgtatcatttgggagttccaacgacacgagctttgtccttagtgactactggagaaggggttttgcgcgacatgttctatgacggcaatgtcaaaatggagccaggtgccgtcgtttgccgtgtatccccgtcattcattcgttttgggtctttccaaattcatgcagcccgggataaggccgacctcccaattgtcaaacaattggctgattatacaattcatcatcattatcctgactttgaggatttgccattcgaaaggcaggggcaagacggttctgaatctcaaaaaggcgagaacaatgctcctcaaattgatacatcgaaaaataaatattcagcatggttcactgagattgcagagcggactgcattgatgattgcaaaatggcaagcagttggattcacacatggagttatgaatactgataatatgagcatattgggtttaactattgactacggtccttttggatttttggacgcttttgatcccaaatatacgccgaatacaacagatcttcctggtcgtcgttatgggtttgccaatcaaccggatattggtctgtggaatgtgatgcagctggcaaacacactatacactgcagaactcattactgcagatgaagcccaatatgtaacaattcaaatatatgctgataaattcatgtttttatatcagcaacacatgagtaacaaaattggtctgaaaacatataacaaagatctgcttagcaagcttctgaacaatatggccttcgacaaagtggactacacaaactttttcaggtcgttcagtaatctgaaagctactccagaaacctcagacgatgacttgattgcaccgctgaaaaatgcactccttgacctgagcaaggaaaggagaaaagtgtggctcgactggttgcaccagtacgtcaagaacgtggttgatgagggtgtatcagaggcagataggaaagccttgatgaattcagtcaacccaagatacgtcctgcgtaattatatgttacagagtgctattgatatggcagaacaaggggacttttcggaagtcgagaacttgctgaaactcatcgagcggccttacgacgatcaacctggaatggagaaatacgctaggcttccgcctgcctgggcttatcgtccaggggtttgcatgttatcttgctcgtcttga

SEQ ID NO: 508 - protein, 702 aa, Physcomitrella patens
MASSFRAASHCIPVSAPASAFPTNPFLLRSAPIWSGFGGLRVGVENGGSEAVHRPPHAGCGLGVRAGAGRVDRGGGREVVYGLLGRRAGESRRGKAGAALLRDFGSSRGRVLTAAMTDNMKNLNLDDDKSVNGDVAEKVDKSEEIGASGSLGRKKLEDLIWDHSFVRELPGDKRSDGPTRQVLHACYSKVTPSVRVKNPELVSWSRHVADLLDLDYKEFERPDFPLLFTGASQLKGGLAYAQCYGGHQFGVWAGQLGDGRAITLGEILNSKGQRWELQLKGAGKTPYSRTADGLAVLRSSVREYLCSEAMYHLGVPTTRALSLVTTGEGVLRDMFYDGNVKMEPGAVVCRVSPSFIRFGSFQIHAARDKADLPIVKQLADYTIHHHYPDFEDLPFERQGQDGSESQKGENNAPQIDTSKNKYSAWFTEIAERTALMIAKWQAVGFTHGVMNTDNMSILGLTIDYGPFGFLDAFDPKYTPNTTDLPGRRYGFANQPDIGLWNVMQLANTLYTAELITADEAQYVTIQIYADKFMFLYQQHMSNKIGLKTYNKDLLSKLLNNMAFDKVDYTNFFRSFSNLKATPETSDDDLIAPLKNALLDLSKERRKVWLDWLHQYVKNVVDEGVSEADRKALMNSVNPRYVLRNYMLQSAIDMAEQGDFSEVENLLKLIERPYDDQPGMEKYARLPPAWAYRPGVCMLSCSS

SEQ ID NO: 509 - DNA, 1941 bp, Populus trichocarpa
atgccaccactgctttctcattcctcctcttcactctccctcctccgtcccttcctccctatcaaattccctttctaccctccccctttcgtcaaatcccaattctgccctctatcacctcctgctcacctcttcaaaccctccctgtcacgccacgtcagcacgagctccttcccttctagcagaggtagaggtagtagtgtttccatggagtcatcctcaccagaaccaactgtgtcactcgactccgtgacgcaggatttaaagaatcaaactttaggtcctgatgatgttagtaaggctaaattgaagcttgaagatctcaattgggaccattcttttgttagagcattgcccggggatccaagggctgatacaattccacgtcaggtgatgcatgcttgctatacgaaagtgttaccatctgctgaagtggagaaccctgagcttgttgcttggtctgattctgttgctgatttatttgatttggatcctaaagaatttgaaaggccagattttccccttttgttttcaggggcttctcctttggttggagcgttgccatatgctcagtgctatggaggacatcaatttgggatgtgggcaggtcagctgggtgatggtagggcaataacacttggggaggttgtaaattcaaagtctgaaaggtgggaactgcaacttaaaggttccgggaggactccgtatagccgttttgcagatggccttgcggttttgcgtagcagcattagggaatttctttgcagtgaagcaatgcactgtctaggaatcccgacaactcgtgcactttctctcgtgacaacaggaaaatatgttacccgtgacatgttttacgatggcaatgcaaaggaagaacctggtgctattgtttgccgagttgcaccatcctttcttcggtttggttcgtaccaaatacatgcctctagagggaaagaggaccttgaaattgttcgtgctttggcagattatgccatcagacatcattttcctcatattgagaacatgaataaaagcgagagcttatcttttagtacaggtgatgaagatcattcagttgtggatctgacctcaaacaagtatgcagcttggacagtggagattgctgaacggactgcttctatgatcgcaagctggcaaggggttggctttacacatggagtaatgaacactgacaacatgagtatactgggtctcaccattgattatggtccctttggattcctggatgcctttgatcctagtttcactccaaacaccacggatcttccaggaagaagatactgttttgcaaatcagcctgatattggtttatggaatattgcacagttcacagctaccctttcaactgccaagttgattagcgataaggaggcagattatgccatggaaagatatggaaacaaattcatggatgagtatcaagctatgatgactagaaaacttggccttccaaagtacaataaacaattgatcagcaaactccttaataatatggctgtggataaagttgattacacaaatttcttccggttgctttccaatgttaaagcagacccaaaaattccggaagatgagttgttagttcccctgaaggctgttcttttagatattggacaggagcgtaaagaggcatggatgagctgggtgcaatcctatgtgcatgagctggctgctagtgggatctcagatgagcagaggaaggcccaaatgaattcagtaaaccccaagtatgttctccgaaactacttgtgccagactgccattgatgcagctgaacaaggtgattacacagaggtcaggaggctccttaaattaatggagcggccgtatgatgagcagcctggaatggaaaaatatgctcgccttccaccagcctgggcgtatcggcctggtgtttgcatgctttcatgctcttcatga

SEQ ID NO: 510 - protein, 646 aa, Populus trichocarpa
MPPLLSHSSSSLSLLRPFLPIKFPFYPPPFVKSQFCPLSPPAHLFKPSLSRHVSTSSFPSSRGRGSSVSMESSSPEPTVSLDSVTQDLKNQTLGPDDVSKAKLKLEDLNWDHSFVRALPGDPRADTIPRQVMHACYTKVLPSAEVENPELVAWSDSVADLFDLDPKEFERPDFPLLFSGASPLVGALPYAQCYGGHQFGMWAGQLGDGRAITLGEVVNSKSERWELQLKGSGRTPYSRFADGLAVLRSSIREFLCSEAMHCLGIPTTRALSLVTTGKYVTRDMFYDGNAKEEPGAIVCRVAPSFLRFGSYQIHASRGKEDLEIVRALADYAIRHHFPHIENMNKSESLSFSTGDEDHSVVDLTSNKYAAWTVEIAERTASMIASWQGVGFTHGVMNTDNMSILGLTIDYGPFGFLDAFDPSFTPNTTDLPGRRYCFANQPDIGLWNIAQFTATLSTAKLISDKEADYAMERYGNKFMDEYQAMMTRKLGLPKYNKQLISKLLNNMAVDKVDYTNFFRLLSNVKADPKIPEDELLVPLKAVLLDIGQERKEAWMSWVQSYVHELAASGISDEQRKAQMNSVNPKYVLRNYLCQTAIDAAEQGDYTEVRRLLKLMERPYDEQPGMEKYARLPPAWAYRPGVCMLSCSS

SEQ ID NO: 511 - DNA, 546 bp, Triticum aestivum
  misc_feature (470)..(470): n is a, c, g, or t
  misc_feature (479)..(479): n is a, c, g, or t
  misc_feature (485)..(485): n is a, c, g, or t
atgcccaagtgttacggtggacaccagtttggttcatgggctggtcagttgggggatggacgagcaataactctcggagaggttctcaattctcgaggtgagaggtgggagttgcagctcaagggtgctggaaagactccttacagccgatttgcagatggcctcgctgtcctgcgcagaagcatccgtgaattcttatgcagtgaagctatgcatggtctaggcattcctacaactcgtgctctttgtctagttgaaactggcaaatctgttgtgcgagatatgttctatgatggtaatgcaaaagaggagccaggtgcaattgtgtgccgtgtagcaccatcgtttttacgttttggttcataccagttacatactacaaggggcaaagaggaccttgaaattgttcgtcgtttggcagactacacaatacgtcatcactacccacatcttgaaaatattaaaaaaantgaagttancttttngaggcagctatgggagacatccaacataatcttacttccaacaatatcgctgggaatttag

SEQ ID NO: 512 - protein, 181 aa, Triticum aestivum
  misc_feature (157)..(157): Xaa can be any naturally occurring amino acid
  misc_feature (160)..(160): Xaa can be any naturally occurring amino acid
  misc_feature (162)..(162): Xaa can be any naturally occurring amino acid
MPKCYGGHQFGSWAGQLGDGRAITLGEVLNSRGERWELQLKGAGKTPYSRFADGLAVLRRSIREFLCSEAMHGLGIPTTRALCLVETGKSVVRDMFYDGNAKEEPGAIVCRVAPSFLRFGSYQLHTTRGKEDLEIVRRLADYTIRHHYPHLENIKKXEVXFXRQLWETSNIILLPTISLGI

SEQ ID NO: 513 - DNA, 1893 bp, Zea mays
atgccgccccagttccccaccgcccgcctcctcctccctagtcacaggctgctcccgctcctctcccctctcccctccgcgtccctgtcccctgctcctcgcaccctccgcctcccgccgccgcagcttcttcaccgagtcgcccgccgccgcccgctgctgcgcggcatggcctccgccgccgcccccgggtcacacgccgccgcggaagcgccccccgtcgacgtggggggagggggcgctggcgccccgcggcggctcgtcctggaggagctaccctgggaccattccttcgtccgcgagctgcctggcgacccgcgatcggacactatcccgcgggaggtcctgcacgcctgttactccagggtgtctccctctgccaaagtggacaaccccaagctggttgcgtggtctgattccgtggccgatctactcgatctggatcacaaagagtttgaaagacctgatttccctcagtttttctcaggagcaactccactagtggggagtttgccctacgcacagtgctatggaggacatcagtttggtgtatgggctggtcagttgggggatggaagagcgatagctcttggagaggttgtcaactctcgaggtgagagatgggagttgcagctcaaaggttgtggaaagactccatacagcagatttgctgatggtcttgctgtcctacgcagcagcatccgtgaattcttatgcagcgaagccatgcacggcctaggcattcctacaactcgtgctctttgtctagttgaaactggaaaatcagttgtccgagatatgttctatgatggcaatgcaaaggaagaacctggtgcaatagtttgtcgtgtagcaccgtcttttttacgttttggttcgtatcagatacacgcttcaaggggcaaagaggacattgagattgttcgtcgtttggcagactacacgatacatcatcactttccacatcttgaaaatatgaaaaagagtgaaggtttgtcattcgagacagctataggagattccccaacaatagatctcacatcaaacaaatatgcagcttgggcagttgaggtggcggagaggactgcttacttgatagctagatggcaaggtgttggcttcacccatggtgtacttaacactgacaacatgagtgtgctgggcctaactattgattatggaccatttggatttctcgatgcatttgatcctagctatactccaaatactactgatcttcctgggaagaggtactgttttgcaaatcaacctgatgttggcttgtggaatattgctcagttcactggaccactgtcctctgctgaacttatcagccaagatgaggcaaattatgtgatggagaggtatgggacaaagttcatggatgagtaccaatctatcatgaccaaaaaactgggcttaactaagtataataagcagctaattagtaagctgcttagcaacatggcagttgacaaggttgactataccaacttcttccgtcttctttcgaatgtcaatgcggatcctggtattccggagaatgagctgcttgtcccactgaaggctgctctcctagatattgggaaagaaaggaaggaagcatggattagttgggtacagacttatattgaagagctggtggagagcggcgttcctgatgaagaaaggaaagccgcgatgaactctgttaatccaaagtatattctccgcaactatctctgccagtctgctatcgacgtagctgagcaaggcgattacgaggaggttcgccgggtgcttagggtaatgcataatccgtatgacgagcagccgggaatggagaaatatgcacggttgccaccagcttgggcatacagacctggagtgtgcatgctgtcctgctcctcgtga

SEQ ID NO: 514 - protein, 630 aa, Zea mays
MPPQFPTARLLLPSHRLLPLLSPLPSASLSPAPRTLRLPPPQLLHRVARRRPLLRGMASAAAPGSHAAAEAPPVDVGGGGAGAPRRLVLEELPWDHSFVRELPGDPRSDTIPREVLHACYSRVSPSAKVDNPKLVAWSDSVADLLDLDHKEFERPDFPQFFSGATPLVGSLPYAQCYGGHQFGVWAGQLGDGRAIALGEVVNSRGERWELQLKGCGKTPYSRFADGLAVLRSSIREFLCSEAMHGLGIPTTRALCLVETGKSVVRDMFYDGNAKEEPGAIVCRVAPSFLRFGSYQIHASRGKEDIEIVRRLADYTIHHHFPHLENMKKSEGLSFETAIGDSPTIDLTSNKYAAWAVEVAERTAYLIARWQGVGFTHGVLNTDNMSVLGLTIDYGPFGFLDAFDPSYTPNTTDLPGKRYCFANQPDVGLWNIAQFTGPLSSAELISQDEANYVMERYGTKFMDEYQSIMTKKLGLTKYNKQLISKLLSNMAVDKVDYTNFFRLLSNVNADPGIPENELLVPLKAALLDIGKERKEAWISWVQTYIEELVESGVPDEERKAAMNSVNPKYILRNYLCQSAIDVAEQGDYEEVRRVLRVMHNPYDEQPGMEKYARLPPAWAYRPGVCMLSCSS

SEQ ID NO: 515 - DNA, 1605 bp, Arabidopsis thaliana
atgtctggtaacaacaacaatccacaaaagcctcaaggctctgcgcctttgccttttgggaatcctgggatggcctctgcatctgttcctggaaaccaaggttttgctcagtctcatatggcagctaactttcaagctcagtttcagttctctcaagctcaggccctagcccatgctcaagcacagtctaaagttcaagcacaactgcaagctcagttacaagctcaaggcatgacgatgaaccaagcacaaggttctccggggattggtggcttgggtccttcttctccttctttgacgactcctggaagtttaaacatgaagagattccagcagaaaccgccgatgcgacctcctggtgctcctgcgagtaacaacactatctccccaatgagaacaatggagttaactcctgctgctcggaaaaagaaacaaaagcttccagaaaagtcattgcaggagcgggtggctgcaatcttgccagagtctgccttatacacacaacttctggagtttgagtctcgggttgatgctgcgttaactagaaagaaagttgacatccaggaagcccttaaaaaccctccctgcatacagaagactcttaggatctacgttttcaactcgtttgctaaccaaaacaacacgatccctgggaatcctaatgctgacccgccaacatggactcttaaaattattggtaggatactggaagatggggtggatcccgaccagccagggtttgttcagaaagcaaacccattgcatcccaaattctcgtctttcttcaaaagggttacagtttccctggatcagaggctgtatcctgagaacccattgatcatatgggagaatgctcgatcacctgctcctcaggaaggctttgagataaagaggaaagggaatcaggagtttgctgctagtatacggttggagatgaactacgtccctgaaaagttcaagctttctactgcattgatggatgttctcgggattgaggttgaaacccgcccaagaatcatcgctgcaatttggcattacgttaaggcgaggaaactgcagaacccaaatgacccctctttcttcaactgtgatgctgcacttcagaaagtttttggagaagaaaagttgaaattcactatggtctctcagaaaatatctcatcacttgtcgcctccaccacctattcacttagaacacaaaatcaagctctcaggaaataatccggccgtatcagcatgttacgatgtgctagtggatgtacccttcccgatccaaagagatctgaacaatttgctagccaacgcagagaagaacaaagagattgaggcttgtgatgaagcaatatgtgcagccataaggaaaatccatgagcataggaggaggcgggcatttttcttggggttcagccaatcgccagttgaattcataaacgccctgatcgaatctcagagcaaggatctaaaggtcgttgcgggagaagccagtcgaaatgctgagagagaacgtcgatcagacttcttcaaccaaccttgggtcgaagatgcagttatacgttacttgaaccggaggccagcagctgggaacgatgggccagggagttggtga

SEQ ID NO: 516 - protein, 534 aa, Arabidopsis thaliana; identical to SEQ ID NO: 44

SEQ ID NO: 517 - DNA, 1407 bp, Arabidopsis thaliana
atgtctgggaataacgagttgaacgcactaaaagggcctcaaagctctctgccttggccatttggaatggcctctgcatcgtttgctccctcccacatggcccctcctaactttcaacctcagtttcagctctctcaagaccaagggattagtgctcctggaagaaggttcccacataaacctcccattggaggacctcctgctgttcctcctagtatggagttgactccagcttccaggaaaaagaaacataagcttccagacaagtcctccttgcaggagcgcgttgctgccgtcttgcccgagtctgctctctacacacagcttcttgagtttgagtctcgggttgatgccgctctcttcagaaagaaagttgacatccaagactcccttaagaaccctccttccattcagaagacccttaggatctacgttttcaacaccttttccaaccagatccctggtcctgaccctcccacatggactcttaggattttcggcagggtcctggatcctgaccacactggtggattagttcagaattcaaacccactttatcccaagttctcgtctttcttcaaaacgttaaagatatccctggaccagagcctgtatcctgagaaccatctgatcgaatggaaaagggatcgatcgcctgctcctctggaagggtttgagataaagaggatagggtgtcaggagtttgcagctactatactgttggagatgaattacgtccctgagaagttcaagacttctcctgctttgatgcaagttttgggcattgaggttgacactcgcccaagaatcattgcggcaatctggcattacgtgaaagtcaggaaactgcaaaacccaaacgacccttctttcttcaactgtgatgctgctctccacagtgtttttggggaagagaagatgaaattcactatgctctctcataagatatctcagcacctatcacctccgcctcccattcagcttgtacacaagatcaagctttcggggaacaatccagccatctcagcatgttacgatgtgcttgtggacataccagcaccggtccaaacggagctttccaatctgctcgctaatccagagaagaacaaagagattgaggcatgtgatgaagccatatgcggagccataaggaaaatccacgagcacagaaggagacgggcgtttttcttagggtttagccagtcaccggtggaattcaccaatgccttgatggaatctcagaccaaagatctgaagcttgttgcaggagaagcaagtcgaaacgctgagaaagaaggccgatcagagttcttcaatcagccatgggtggaggatgctgcaatacgttacttgaaccggaagccagcaggcgggtaagatgcagatgggccaagaagttcatgagtt

SEQ ID NO: 518 - protein, 458 aa, Arabidopsis thaliana
MSGNNELNALKGPQSSLPWPFGMASASFAPSHMAPPNFQPQFQLSQDQGISAPGRRFPHKPPIGGPPAVPPSMELTPASRKKKHKLPDKSSLQERVAAVLPESALYTQLLEFESRVDAALFRKKVDIQDSLKNPPSIQKTLRIYVFNTFSNQIPGPDPPTWTLRIFGRVLDPDHTGGLVQNSNPLYPKFSSFFKTLKISLDQSLYPENHLIEWKRDRSPAPLEGFEIKRIGCQEFAATILLEMNYVPEKFKTSPALMQVLGIEVDTRPRIIAAIWHYVKVRKLQNPNDPSFFNCDAALHSVFGEEKMKFTMLSHKISQHLSPPPPIQLVHKIKLSGNNPAISACYDVLVDIPAPVQTELSNLLANPEKNKEIEACDEAICGAIRKIHEHRRRRAFFLGFSQSPVEFTNALMESQTKDLKLVAGEASRNAEKEGRSEFFNQPWVEDAAIRYLNRKPAGG

SEQ ID NO: 519 - DNA, 1617 bp, Brassica napus
atgtctgctaacaacaacaatccacagaagcctcaacaaggctctgcgccttcacccttcggcggtaaccctgggatggcctctgcatctgttcccggaaaccaaggcttcactcagcctcacatggcacctaactttccagctcagtttcaattctcacaagcccaggccatggcccatgctcaagcccaagcccagtctaaagcccaagctcagttccaagctcagatgcaagcagggatgactatgaaccaagggcaaggctcccaggggattggtggtgtgttgggttcgtcttctccttccatgactcctggtagcttgaacatgaagaggttccagcagaggccgccgatgcggcctccttctggtttccccgcgagtaacaacactgtctcccccatgagaacgatggagttgactcctgctgcgaggaagaagaagatgaagcttcctgagaagtcgttgcaggagagggtggcagcaatcttgcctgagtctgcgttgtacacgcagcttcttgagtttgagtcaagggtcgatgctgctttgagtaggaagaaagttgacatccaggaggctcttaagaaccctccttgcactcagaagacgcttaggatctatgtgttcaactcgtttgctaaccaaaacaataccatccctgggaatccaaacgctgacccgccgacatggactcttaagattgttggtaggatcttggaagatggggtggatccggaccagccaggttttgttcagcaagcaaacccgtcgcatcccaagttctcgtctttcttcaagaaggtaatagttaacctggaccagaggctgtatcctgagaactcggcgatcacatgggagagcgctagatcacctgctcctcaggaagggtttgagataaagaggaaagggaatcaggagtttgcagctactattaggttggagatgaactacgttcctgagaagttcaagctttctactgcgttgatggatgttctcgggattgaggttgagaccagaccaagaataatctctgcgatatggcattacgttaaggcgaggaaactgcagaacccaaacgacccttctttcttcaactgcgacgctgcgcttcacaaagtgtttggggaagagaaggtgaagttcacaatggtctctcagaagatatctcatcacttgtcacctccaccgccgattcatttagaacacaagatcaagctgtcgggaaacaacccggctatatcggcatgttacgatgtcctggtggatgtgccgtttccgattcagagggatctgaacaacttgttggccaacgcagagaagaataaagagattgaggcttgtgatgaagcgatatgtgcagccattaggaaaatccatgagcataggaggagacgtgcatttttcttgggatttagtcagtcgccggttgagttcataaacgcactgatcgaatctcagagcaaggatctgaaggttgtagcgggtgaagccagtcgaaatgctgagaaagaacgtcgagcagacttcttcaatcaaccttgggttgaggatgcggtaatacgttacttgaaccggaagccagcagctgggaacgaaggaccaggaacctggtga

SEQ ID NO: 520 - protein, 538 aa, Brassica napus
MSANNNNPQKPQQGSAPSPFGGNPGMASASVPGNQGFTQPHMAPNFPAQFQFSQAQAMAHAQAQAQSKAQAQFQAQMQAGMTMNQGQGSQGIGGVLGSSSPSMTPGSLNMKRFQQRPPMRPPSGFPASNNTVSPMRTMELTPAARKKKMKLPEKSLQERVAAILPESALYTQLLEFESRVDAALSRKKVDIQEALKNPPCTQKTLRIYVFNSFANQNNTIPGNPNADPPTWTLKIVGRILEDGVDPDQPGFVQQANPSHPKFSSFFKKVIVNLDQRLYPENSAITWESARSPAPQEGFEIKRKGNQEFAATIRLEMNYVPEKFKLSTALMDVLGIEVETRPRIISAIWHYVKARKLQNPNDPSFFNCDAALHKVFGEEKVKFTMVSQKISHHLSPPPPIHLEHKIKLSGNNPAISACYDVLVDVPFPIQRDLNNLLANAEKNKEIEACDEAICAAIRKIHEHRRRRAFFLGFSQSPVEFINALIESQSKDLKVVAGEASRNAEKERRADFFNQPWVEDAVIRYLNRKPAAGNEGPGTW

SEQ ID NO: 521 - DNA, 1647 bp, Vitis vinifera
atggctgtgaataacaataatccacccaagaaccttggggcttcttcttcgccctttggcaatgccggaatgggttctcctgctatgcctgcaaatcctgtgttctcgcaaccgcaagctcaggggcaaattgggggtggctttcagggtcagtttcagctgtcccaggctcatcaagcccatgtcattgcccaggcacattctaaagcacaagctcatgcccaagctcaagcgcaggctgcccacgcccagttccaagctcagttacaggctcaaggaatgacccttaatcagtcccaaggcattgggattgggaatatgggtggatcttcaccctccataggagcacccggcaattcaaacatgaaacggactttgcagaagcctccagtacgccctcctggccctttaggtgctaatactatctctcctttgaaagtcatggaacttacacctgctgcccgcagaaagaagcagaagcttccagagaagcaattacaagatagagtggcagcaattctgccagagtctgctttgtacacacaactccttgagtttgagagtcgagttgatgctgctctagctaggaagaaaattgacattcaagaggcacttaaaaaccctccttgtgttcaaaaaactcttcgaatttatattttcaacactttcgctaatcagattcgcacaattcccaagaagccaaatgcagagccacctacctggaccctcaagataattgggaggatcttggaagaaggggtagatcctgaccaggctgcaatgctccacaaatcaaatgtctcgtacccaaaattctcgtctttcttcaagagagtcaccatttcccttgaccagagactatatcctgataaccctattattatatgggagaatgctcgatccccagcacctcatgagggctttgaggtaaagagaaagggggataaagaatttactgtgaatatacggttagaaatgaattatgtgcctgagaagtttaagctttcttcagctttgatggaagttcttggtattgaggttgatacacgcccaagaattatagctgcaatatggcattatgtgaaggctagaaaattgcagaaccccaatgacccttcatttttcaattgtgatccgcctcttcagaaagtgttcggggaagacaagatgaaattcaccatggtgtcacagaagatatcacagcatttgtctcctccgcaacctatacatttggaacataagatcaagctttcggggaattgtccagctggaaatgcatgctatgatgtgttggttgatgtcccctttccaatacagaaggaattgtctgctttattggctaacacggagaaaaacaaagagatcgatgcatgtgatgaagcaatttgttctgctataagaaagatacatgaacaccgtcggaggcgggcattctttcttgggtttagtcaatctcctgtggaatttattaacactttgattgaatctcaaagcaaagatctgaagctagtggctggggaagctagtcgcaatgctgaaaaggagcggcgatcggacttcttcaaccagccatgggttgaagatgctgtcattcgttatctgaatcgcaagccagttgctggaagtgacgctcctgggagtacatga

SEQ ID NO: 522 - protein, 548 aa, Vitis vinifera
MAVNNNNPPKNLGASSSPFGNAGMGSPAMPANPVFSQPQAQGQIGGGFQGQFQLSQAHQAHVIAQAHSKAQAHAQAQAQAAHAQFQAQLQAQGMTLNQSQGIGIGNMGGSSPSIGAPGNSNMKRTLQKPPVRPPGPLGANTISPLKVMELTPAARRKKQKLPEKQLQDRVAAILPESALYTQLLEFESRVDAALARKKIDIQEALKNPPCVQKTLRIYIFNTFANQIRTIPKKPNAEPPTWTLKIIGRILEEGVDPDQAAMLHKSNVSYPKFSSFFKRVTISLDQRLYPDNPIIIWENARSPAPHEGFEVKRKGDKEFTVNIRLEMNYVPEKFKLSSALMEVLGIEVDTRPRIIAAIWHYVKARKLQNPNDPSFFNCDPPLQKVFGEDKMKFTMVSQKISQHLSPPQPIHLEHKIKLSGNCPAGNACYDVLVDVPFPIQKELSALLANTEKNKEIDACDEAICSAIRKIHEHRRRRAFFLGFSQSPVEFINTLIESQSKDLKLVAGEASRNAEKERRSDFFNQPWVEDAVIRYLNRKPVAGSDAPGST

SEQ ID NO: 523 - DNA, 1392 bp, Oryza sativa
atgctgccacctgcatcgccgcctgctgtccgtcagtgcctctccttcacctcccaccgcatcgctgcctgccgccgagaggcgcccctcatgaagggagagagcgaggaggaagaaacggccgctgccgccgcggccgccgtgggggcgaactccgccggcggcgtcgacctcaccccggccgccgcgcggcgcaacaagaagcggaagctccccgagaagcagctccccgaccgcgtcgccgcgctgctcccggagtcggcactgtacactcagctgctcgagttcgagtcccgcgtcgacgccgcgctgcaccgcaagaaggtggacatccaggaggcgctcaagtcaccccccgcgctgcagcgcacgctccgcatctacgtgttcaacaccttcgccaaccaggcgccgcgcaccatcccgccgcccaagaacgccgagccgcccacctggtcgctcaagatcatcggccgcgtgctcgaggacggcgccgagctggaccccgccagcgtcgtgcccaagcacaaccctgtgtaccccaagttctcgtccttcttcaagagggtgacgattgcgctcgacccgtcgctgtacccggagaacccgctgatcatttgggagaatgcgcggtcggccgccccacaggaagggttcgaggtgaagaggaaaggggataaggagttctccgcgaatatccggctggagatgaactataaccctgagaagttcaagctctcgcagcctctgatggaggtgctcggggttgaggtggacactcgttcgagggtgattgctgccctctggcagtacatcaaagcgaagaagctgcagaatccaaccgatccttcgttctttatgtgtgatccacagttgaagaaggtctttggggaggataagctgaggtttgcgatgctatcgcagaagatatcacagcatctctctcctccgccgcccatcaacttggagcataagattaagctctctgggaatggcgcgcatgcgagtgcttgctatgatgtgattgtggatgttcctttccctctgcagaaggagatgtctgcatttcttgccaacactgagaagcacaaggacattgaggcatgtgatgaggtgatatctgcttcgatcaagaagatccatgagcaccgcaggaggagggcattcttccttggtttcagccagtccccagtggagttcatcaatgcactgatagcgtctcagagtaaagatttgaagctgatcgcaggagaagcaaataggaatattgaaagagaaagacgtgcagacttctataatcaaccatgggttgaggatgctgtcataagatacctgaaccgcaaaccggctagcggtaatgagggcccaggcggtggtgctggtggttcatga

SEQ ID NO: 524 - protein, 463 aa, Oryza sativa
MLPPASPPAVRQCLSFTSHRIAACRREAPLMKGESEEEETAAAAAAAVGANSAGGVDLTPAAARRNKKRKLPEKQLPDRVAALLPESALYTQLLEFESRVDAALHRKKVDIQEALKSPPALQRTLRIYVFNTFANQAPRTIPPPKNAEPPTWSLKIIGRVLEDGAELDPASVVPKHNPVYPKFSSFFKRVTIALDPSLYPENPLIIWENARSAAPQEGFEVKRKGDKEFSANIRLEMNYNPEKFKLSQPLMEVLGVEVDTRSRVIAALWQYIKAKKLQNPTDPSFFMCDPQLKKVFGEDKLRFAMLSQKISQHLSPPPPINLEHKIKLSGNGAHASACYDVIVDVPFPLQKEMSAFLANTEKHKDIEACDEVISASIKKIHEHRRRRAFFLGFSQSPVEFINALIASQSKDLKLIAGEANRNIERERRADFYNQPWVEDAVIRYLNRKPASGNEGPGGGAGGS

SEQ ID NO: 525 - DNA, 1671 bp, Oryza sativa
  misc_feature (357)..(358): n is a, c, g, or t
atggccaccggcggcaaccccaacccgaactccacgccgacccctcagccgcgcccgccccagccgcagcagcagggcggctccccggcgaccccgctcggccacctccgcccgccttccctcgcgggctcccccttccagggcctcttccacaccccgccccagcacaacccggccttccagatccacatgggcgccgacgcctcgccgcagaacccgcttatggccgctgccgccgccgccgccaacacagcaggcactcacagcacaaagcagccacatccaccaagaagcacacaccgcagcggcaccaccgcacccagggctcctcactcctccagggggcggcgcaacagnncacgcacgccagccgcggccgcgtccgcggccgcggcgtacaaggccgctgccgccgcggccgccgtgggggcgaactccgccggcggcgtcgacctcaccccggccgccgcgcggcgcaacaagaagcggaagctccccgagaagcagctccccgaccgcgtcgccgcgctgctcccggagtcggcactgtacactcagctgctcgagttcgagtcccgcgtcgacgccgcgctgcaccgcaagaaggtggacatccaggaggcgctcaagtcaccccccgcgctgcagcgcacgctccgcatctacgtgttcaacaccttcgccaaccaggcgccgcgcaccatcccgccgcccaagaacgccgagccgcccacctggtcgctcaagatcatcggccgcgtgctcgaggacggcgccgagctggaccccgccagcgtcgtgcccaagcacaaccctgtgtaccccaagttctcgtccttcttcaagagggtgacgattgcgctcgacccgtcgctgtacccggagaacccgctgatcatttgggagaatgcgcggtcggccgccccacaggaagggttcgaggtgaagaggaaaggggataaggagttctccgcgaatatccggctggagatgaactataaccctgagaagttcaagctctcgcagcctctgatggaggtgctcggggttgaggtggacactcgttcgagggtgattgctgccctctggcagtacatcaaagcgaagaagctgcagaatccaaccgatccttcgttctttatgtgtgatccacagttgaagaaggtctttggggaggataagctgaggtttgcgatgctatcgcagaagatatcacagcatctctctcctccgccgcccatcaacttggagcataagattaagctctctgggaatggcgcgcatgcgagtgcttgctatgatgtgattgtggatgttcctttccctctgcagaaggagatgtctgcatttcttgccaacactgagaagcacaaggacattgaggcatgtgatgaggtgatatctgcttcgatcaagaagatccatgagcaccgcaggaggagggcattcttccttggtttcagccagtccccagtggagttcatcaatgcactgatagcgtctcagagtaaagatttgaagctgatcgcaggagaagcaaataggaatattgaaagagaaagacgtgcagacttctataatcaaccatgggttgaggatgctgtcataagatacctgaaccgcaaaccggctagcggtaatgagggcccaggcggtggtgctggtggttca

SEQ ID NO: 526 - protein, 557 aa, Oryza sativa
  misc_feature (119)..(120): Xaa can be any naturally occurring amino acid
MATGGNPNPNSTPTPQPRPPQPQQQGGSPATPLGHLRPPSLAGSPFQGLFHTPPQHNPAFQIHMGADASPQNPLMAAAAAAANTAGTHSTKQPHPPRSTHRSGTTAPRAPHSSRGRRNXXRTPAAAASAAAAYKAAAAAAAVGANSAGGVDLTPAAARRNKKRKLPEKQLPDRVAALLPESALYTQLLEFESRVDAALHRKKVDIQEALKSPPALQRTLRIYVFNTFANQAPRTIPPPKNAEPPTWSLKIIGRVLEDGAELDPASVVPKHNPVYPKFSSFFKRVTIALDPSLYPENPLIIWENARSAAPQEGFEVKRKGDKEFSANIRLEMNYNPEKFKLSQPLMEVLGVEVDTRSRVIAALWQYIKAKKLQNPTDPSFFMCDPQLKKVFGEDKLRFAMLSQKISQHLSPPPPINLEHKIKLSGNGAHASACYDVIVDVPFPLQKEMSAFLANTEKHKDIEACDEVISASIKKIHEHRRRRAFFLGFSQSPVEFINALIASQSKDLKLIAGEANRNIERERRADFYNQPWVEDAVIRYLNRKPASGNEGPGGGAGGS

SEQ ID NO: 527 - DNA, 1266 bp, Physcomitrella patens
atgggagcgaacaatgcgggtgggaacacgtcgtctgcgtttaaggtagcggatgtgtcccccgccgcgaggcggaagaagcagaaagtggcggacaagcagattcctgataaggtcgctgctctgttgcccgaatctgctatttacacccagctcgtggagtttgaggcgcgcgtggacgcggcgctggctaggaaaaagcttgacattcaggaggttgtgcgatcgccgccccctgtggagcgcgttttgagaatgtatgttttcaatacgtatgctaatcagactccgaaccctaattcttcatttcagcagcattatgtggagccgccgtcatggacgctgaggattatggggcgtgttctggagggcgatgatgtggaggctaatgggaatggctcgaaaccggcgaactcttcgttgccgaaattctcgtcgtttttcaagaggataactattcaattggacccggtgcattacccggaaaacaatatgattgtatgggatagtgctagggcttccaatcatgttgagggttttgagattaagaggcggggaaatgtcgactgtgatgttaacatatggttggaaatggatcataccccggaaaggtttaagttgtcacctgctctagctcaagtacttggcgtcgaggtggatacgcggccacatgttatagctgctgtgtggcaatatatcaagactaagaaactccagaatccagtggatccgaccatgatcaactgcgacgatgcattacaaaaagtctttgatgatgagaagataaaatttgcgtcgatatctgcaagactacaccagcacatgaatccaccacaacccatacagttgtaccacagaatcaaggtgtcagggagtatgccagcgggtaacgcgtgttatgatgtgaacgttaacataccggcgcctctgcttaaagaaatgaatcagtttctgaccaacattgagaagcacagggatattgatctatatgacgacatgatagcaaacactatacggaagattaacgagcatcgccggcgtcgagcttactttcttgggttcagtaattctccggtggattttatcaacggtttgattgcctctcaaagccgggaccttaaaatggtcgttgggcagaatagtcggaacgcggagaaggagcgaagatccgatttttacaatcagccatgggtggaagatgcagtaattcggtacttgaatcgacgaccggccaagggctcggaaggtccggggaacaattcatga

SEQ ID NO: 528 - protein, 421 aa, Physcomitrella patens
MGANNAGGNTSSAFKVADVSPAARRKKQKVADKQIPDKVAALLPESAIYTQLVEFEARVDAALARKKLDIQEVVRSPPPVERVLRMYVFNTYANQTPNPNSSFQQHYVEPPSWTLRIMGRVLEGDDVEANGNGSKPANSSLPKFSSFFKRITIQLDPVHYPENNMIVWDSARASNHVEGFEIKRRGNVDCDVNIWLEMDHTPERFKLSPALAQVLGVEVDTRPHVIAAVWQYIKTKKLQNPVDPTMINCDDALQKVFDDEKIKFASISARLHQHMNPPQPIQLYHRIKVSGSMPAGNACYDVNVNIPAPLLKEMNQFLTNIEKHRDIDLYDDMIANTIRKINEHRRRRAYFLGFSNSPVDFINGLIASQSRDLKMVVGQNSRNAEKERRSDFYNQPWVEDAVIRYLNRRPAKGSEGPGNNS

SEQ ID NO: 529 - DNA, 1611 bp, Populus trichocarpa
atgaataataatagtagtaatcctggaagaagtattggggttccgccctcgtttgtgaattctgttgcaaaggcacaatctatgcacgtgaaccaccaagcaccgcagttgctatcacagtcacaacctcaaacacaagttgggcatccgggccactttcagctgtccgagccgcaagctcaggtcctgggacatgctcagtatgcacaggcagctcatgctcactttcaatctcagatacaattggccaaccaatccattgctcagttgcaaaatgtcaattctggtaatgttggtgtacaatcacctcctgtagccacgcctagcattactagtgctaaaaagtccagccataaaccgccttcaaggccttcaggtggttcatcaaatgccaacatggcttcactgtttaagaccatggagttgactccagctgctcataggaagaaaaggaagcttcatgagaaggagatacctgaaaaagtggcagctcttttgccagagtctgcactttatacccagctgcttgaatttgaggctagagcggatgctgctatggcaagaaagaagatggatattcaagagtcacttaaaaaccctccacgtgttcggaaaacacttcgggtatatgtatttaacacttttgaaaatcaggtgcaaggggctaacgagaggaagaatgctgagcctccttcttggtcattaaagatcattgggaggatattggaagatgggaaagaccctgtgctgactggaatgatccagaaatcatatccaaaattctcgtcttatttcaagaaaattacaatatacttggaccagagcctgtatccagataaccatgtaattttatgggagagcacacggtcacctgttcttcatgagggctttgaggtcaagagaaaaggaaataaggaatttactgcaagaattaggctggaaatgaattatgtgcctgagaaattcaagctttcacctgctctttcagaagtccttggaattgagatagagactcgccccagaattttggcggcaatttggcattatgtgaagtctaggaagttgcagaacccaaatgatccctccttcttcacatgtgacccccttcttcagaaactatttggggaagagaagatgaaattttctctggtttcacagaagataagtctgcatttaacccctccacagcctattcatttggaacataagatcaagctctcagggaatttcccagctggaactacttgctatgatttcatagtcgatgttccttcaccattacaaaaggaccttgctgcgtacttgaccagcacagagagtaacaaagaaattgatgcttgtgatgaattaataagtaactctatactgaagatacatgagcatcgtcggaggcgggctttctttcttggtttcagtcagtctccagcagagtttattaatgctttgattgcttctcagagcaaagatctgaagcttgtcgctggagatgctagccgcaatgcagaaaaagagcagcgatctggtttctataatcagccatgggtggaagatgctgttattcgttacctaaatcgcaagtctacaggaagtgatgctcctggaagctcttga

SEQ ID NO: 530 - protein, 536 aa, Populus trichocarpa
MNNNSSNPGRSIGVPPSFVNSVAKAQSMHVNHQAPQLLSQSQPQTQVGHPGHFQLSEPQAQVLGHAQYAQAAHAHFQSQIQLANQSIAQLQNVNSGNVGVQSPPVATPSITSAKKSSHKPPSRPSGGSSNANMASLFKTMELTPAAHRKKRKLHEKEIPEKVAALLPESALYTQLLEFEARADAAMARKKMDIQESLKNPPRVRKTLRVYVFNTFENQVQGANERKNAEPPSWSLKIIGRILEDGKDPVLTGMIQKSYPKFSSYFKKITIYLDQSLYPDNHVILWESTRSPVLHEGFEVKRKGNKEFTARIRLEMNYVPEKFKLSPALSEVLGIEIETRPRILAAIWHYVKSRKLQNPNDPSFFTCDPLLQKLFGEEKMKFSLVSQKISLHLTPPQPIHLEHKIKLSGNFPAGTTCYDFIVDVPSPLQKDLAAYLTSTESNKEIDACDELISNSILKIHEHRRRRAFFLGFSQSPAEFINALIASQSKDLKLVAGDASRNAEKEQRSGFYNQPWVEDAVIRYLNRKSTGSDAPGSS

SEQ ID NO: 531 - DNA, 1644 bp, Populus trichocarpa
atgtctatgaacaacaactccacaccaaagagtttggggcaatcttcgtcaccacttggtaattcggggatggtcaatccatcgatgggagcgaacccatccttctcacaatcacaaggacaaatgggtgctgcctttcagggtggtcagttccagctgtcccaagcacaggctactgtgcaagctcacttgaaagcacagcaggctcacgctcaagcacaagcagttcatgctgctcaaattcaagcagctcatgtgcaactccaagcacaagggatctctcttaaccaaactcagaatgttggcataggtaatttgggttcgtcttcaccgtcattctcaactcccgggaatgctagtgcaaaacggctccctcagaaacctttgggtaggcctcctggtgttcccatttctagcatggtttcaccattgaaacctatggatctctcatctgctgcacgtagaaagaagcagaagctaccagagaagcagctacaagatagagtagctgcaattctgccagagtctgctctgtacacacagcttcttgagtttgaagctcgtgttgatgctgctttagctagaaagaaggttgacatccaggaggcccttaaaagtcctccttgtgtgcagaaaacccttcgaatttatgtcttcaatacatttgccaatcagacaagaacaatccccaagaagccaaatgctgagcctcctacttggactcttaaagttatcgggagaatcttggaagatgggttagaccctgaccagcctggagcagtccagaaatcaaaccccttgtacccgaagttctcatcttttttcaagagagtgaccattcagttggatcagagactgtatcctgataatcatatcatcatatgggagcatgctcgatcacctgcacctcacgagggttttgaagtcaagagaaaaggggataaagagttcactgtgaatataagattggaaatgaattatgtgcctgagaaatttaagctctctccagctttgatggaagttcttggtatagaggttgaaacccgtcctagaataatagctgcaatttggcattatgtgaaggctaggaaactgcagaaccctgatgacccttcatttttcatttgcgatgcacctcttcagaaagtatttggggaatcaaagatgaaattcacgatggtttcacagaggatatctccgcatttatctcctccacagccgatacatttggagcataaaattaagctttcagggaatagtccagctggaactgtctgctatgatgtgctggtggatgtgccatttccaatacagagggaattgtttgctttgttggcaaatgccgagaagaataaagagattgatacctgtgatgaggcaatatgtactgctataaggaaaattcatgaacatcgaaggagacgggcattcttccttggatttagtcaatcacctgtggaatttgtcaatgctctgattgaatctcaaagcaaggatttgaggctggtagctggagaagctagcagaaatgctgagaaagagcgccgctcggacttctttaaccaaccatgggttgaagatgctgttattcgttacttgaatcgcaagcctgctgtaggaagtgatgctcctgggagcacatga

SEQ ID NO: 532 - protein, 547 aa, Populus trichocarpa
MSMNNNSTPKSLGQSSSPLGNSGMVNPSMGANPSFSQSQGQMGAAFQGGQFQLSQAQATVQAHLKAQQAHAQAQAVHAAQIQAAHVQLQAQGISLNQTQNVGIGNLGSSSPSFSTPGNASAKRLPQKPLGRPPGVPISSMVSPLKPMDLSSAARRKKQKLPEKQLQDRVAAILPESALYTQLLEFEARVDAALARKKVDIQEALKSPPCVQKTLRIYVFNTFANQTRTIPKKPNAEPPTWTLKVIGRILEDGLDPDQPGAVQKSNPLYPKFSSFFKRVTIQLDQRLYPDNHIIIWEHARSPAPHEGFEVKRKGDKEFTVNIRLEMNYVPEKFKLSPALMEVLGIEVETRPRIIAAIWHYVKARKLQNPDDPSFFICDAPLQKVFGESKMKFTMVSQRISPHLSPPQPIHLEHKIKLSGNSPAGTVCYDVLVDVPFPIQRELFALLANAEKNKEIDTCDEAICTAIRKIHEHRRRRAFFLGFSQSPVEFVNALIESQSKDLRLVAGEASRNAEKERRSDFFNQPWVEDAVIRYLNRKPAVGSDAPGST

SEQ ID NO: 533 - DNA, 1668 bp, Populus trichocarpa
atgtctatgaacaacaacaacaacaataataacccgccaaagagtttggggcaatcttcgtcaccattcggtaattcagggatggtcaatccatcgatgggcgcgaacccaacattcccacaagcgcaagcgcagatgggtgctggctttcagggtggtcagttccagctgtcccaagcacaggctactttgcaagcccatttgaaagcgcagcaggctcatgctcaggcacaagcagctcacgctgctcaagttcaagcagctcatgcacaattccaagcgcaattacaagcgcaaggggtttctcttaaccaaaatcagagtgctggaataggcaatttgggttcatcttcaccgtcattctcgactcctggcaatgctagtgcaaaacggctccctcagaaacctctgggtagacctcctggtgttcccatgtcgagcatggtttcaccattgaaacccatggatctttcttccgctgcacgtaggaagaagcagaagctaccagagaagcagctacaagatagagtagcagcaattctgccagagtctgctctgtacacccagcttcttgagtttgaaacccgtgttgatgctgctttagctagaaagaaggtcgacatccaggaggcgcttaaaagccctccttgtgttcagaaaacccttcgaatttatgtcttcaatacatttgccaatcagataagaacaatccccaagaagccaaatgctgaccctccgacttggactcttaaagttatcgggagaatcttggaagatggggtagaccctgaccagcctggagcagtccagaaatcaaacccattgtacccaaagttctcatcttttttcaagagagtgtcaattcagttggatcagagactatatcctgataatcatatcattatatgggagcatgctcgatcacctgcacctcacgagggttttgaagtcaagagaaaaggggacaaagagttctctgtgaatatacgattggaaatgaattatgtgcctgagaaatttaagctctctccagctttgatggaagttcttggtatagaggttgaaacccgtcctagaataatagctgcaatttggcattatgtgaaggctaggaaactgcagaaccctgaggacccttcatttttcaattgcgacgcacctcttcagaaagtatttggggaatcaaagatgaagttcacgatggtttcacagaggatatctcagcatttatctcctccacagccgatacatttggagcataaaattaagctatcggggaatagtccagctggaactgtctgctatgatgtggtggttgacgtgccattcccaatacagagggagttgtctgctttgttggcaaatgctgagaagaataaagagattgatacttgtgatgaggcgatatgtactgctataaggaaaattcatgaacatcgtcggagacgcgcattcttccttggatttagtcaatcacctgtcgaatttgtcaatgctctcattgaatctcaaagcaaggatttgaagctggtagctggagaagctagtagaaatgccgagaaagagcgccgctcagatttctttaaccagccatgggttgaagatgctgtaattcgatatttgaatcgcaagcccgctgccggaagcgatgctcctcggagcatgtga

SEQ ID NO: 534 - protein, 555 aa, Populus trichocarpa
MSMNNNNNNNNPPKSLGQSSSPFGNSGMVNPSMGANPTFPQAQAQMGAGFQGGQFQLSQAQATLQAHLKAQQAHAQAQAAHAAQVQAAHAQFQAQLQAQGVSLNQNQSAGIGNLGSSSPSFSTPGNASAKRLPQKPLGRPPGVPMSSMVSPLKPMDLSSAARRKKQKLPEKQLQDRVAAILPESALYTQLLEFETRVDAALARKKVDIQEALKSPPCVQKTLRIYVFNTFANQIRTIPKKPNADPPTWTLKVIGRILEDGVDPDQPGAVQKSNPLYPKFSSFFKRVSIQLDQRLYPDNHIIIWEHARSPAPHEGFEVKRKGDKEFSVNIRLEMNYVPEKFKLSPALMEVLGIEVETRPRIIAAIWHYVKARKLQNPEDPSFFNCDAPLQKVFGESKMKFTMVSQRISQHLSPPQPIHLEHKIKLSGNSPAGTVCYDVVVDVPFPIQRELSALLANAEKNKEIDTCDEAICTAIRKIHEHRRRRAFFLGFSQSPVEFVNALIESQSKDLKLVAGEASRNAEKERRSDFFNQPWVEDAVIRYLNRKPAAGSDAPRSM

SEQ ID NO: 535 - DNA, 1257 bp, Triticum aestivum
  misc_feature (748)..(748): n is a, c, g, or t
atggccgccgcttataaggctgctaactccggcagcgtcgacctcacccccgctgcgcgccgcaacaagaagcgcaaactcccggagaagcagctcccggaccgcgtcgccgcgctgttgccagagtccgcgctctacacgcagctcctcgagttcgaggcccgcgtagacgcagcgctcgcgcgcaagaaggtggacattcaggaggcgctcaagacaccaccgtccctccagcgcacgctccgcatctacgtcttcaacaccttcgccaaccaggcgccccgcaccatcccgccgcccaagaatggcgatccgcccacctggtcgctcaagatcattggccgtgtgcttgaagacggcgcggacgtggacccagccagtgtcgtgccgaagcacaacccagtgtatccgaaattctcctcgttctttaagagggtgactattgctcttgactcgtcactctatccagagaacccactgattgtctgggagaatgcccggtctgctgcgccgcaggaagggtttgaggtgaagaggaaaggggataaggagtttcttgccaatatccgtctggagatgaattacaaccccgagaagttcaagctgtcacagccactaatggaggtgcttggggtcgaggtggacactcgcgcaagggtgatcgcagccctttggcagtacatcaaggcaaagaagctacagaatccaagtgacccttcctactttatgtgtgacccccaactgaaanaaggtatttgggggaaggataaaatgaggtttgctatgctgtctcagaagatatcacaacatcttgctcctccaccgcccatcaacttggaacataagatcaagctatcagggaatggagcaaactcgagtgcttgctatgatgtattggtagatgttcctttcccactgcagaaggagatgacagcatttcttgccaatactgagaagcacaaggacattgaggcatgtgatgaggtgatatctgcttcaatcaagaagatccatgagcatcgtaggaggagggcgttcttccttgggttcagccagtccccagtggaattcattaatgcgttgatagcatcccagagtaaagatttgaagcttgttgctggtgaagcgagtaggaatattgaaagggaaaggcgtgcggacttctataaccagccatgggttgaggatgctgttataagatatttgaatcgtaaaccgcctggtggcaacgatggccctggtgctggtggttcttga

SEQ ID NO: 536 - protein, 418 aa, Triticum aestivum
  misc_feature (250)..(250): Xaa can be any naturally occurring amino acid
MAAAYKAANSGSVDLTPAARRNKKRKLPEKQLPDRVAALLPESALYTQLLEFEARVDAALARKKVDIQEALKTPPSLQRTLRIYVFNTFANQAPRTIPPPKNGDPPTWSLKIIGRVLEDGADVDPASVVPKHNPVYPKFSSFFKRVTIALDSSLYPENPLIVWENARSAAPQEGFEVKRKGDKEFLANIRLEMNYNPEKFKLSQPLMEVLGVEVDTRARVIAALWQYIKAKKLQNPSDPSYFMCDPQLKXGIWGKDKMRFAMLSQKISQHLAPPPPINLEHKIKLSGNGANSSACYDVLVDVPFPLQKEMTAFLANTEKHKDIEACDEVISASIKKIHEHRRRRAFFLGFSQSPVEFINALIASQSKDLKLVAGEASRNIERERRADFYNQPWVEDAVIRYLNRKPPGGNDGPGAGGS

SEQ ID NO: 537 - DNA, 1578 bp, Triticum aestivum
atggccaccggcggcaaccccaatcccaacgccaaccccggccagccacgcccgcagcagcagccgccgggaagctctccggcgaccccgcataaccacatgcgcccccccactctcggcggttccccctttcagggtcttttccacaccccgcctagccacaatcctgctttccagattcacatgggcgcagcctcctctccccagaccccactaatggccgcggccgcggccgcggcctccgccgccgcatcggccaagcgccctccccagaagcccccttcgcgtccgccggcacccacctccaacgccgccgcagcgtccatggccgccgcttataaggctgctaactccggcagcgtcgacctcacccccgctgcgcgccgcaacaagaagcgcaaactcccggagaagcagctcccggaccgcgtcgccgcgctgttgccagagtccgcgctctacacgcagctcctcgagttcgaggcccgcgtagacgcagcgctcgcgcgcaagaaggtggacattcaggaggcgctcaagacaccaccgtccctccagcgcacgctccgcatctacgtcttcaacaccttcgccaaccaggcgccccgcaccatcccgccgcccaagaatggcgatccgcccacctggtcgctcaagatcattggccgtgtgcttgaagacggcgcggagctggacccagccagtgtcgtgccgaagcacaacccagtgtatccgaaattctcctcgttctttaagagggtgactattgctcttgattcgtcactctacccagagaacccactgatcgtttgggagaatgcccggtctgctgcgcctcaggaagggtttgaggtgaagaggaaaggggataaggagtttcttgccaatatccgtctggagatgaattataaccctgagaagttcaagctgtcacagccactgatggaggtgcttggggtcgaggtggacactcgtgcaagggtgattgcagccctttggcagtacatcaaggcaaagaagctacagaatccaagcgacccttcgtactttatgtgtgacccccaactgaagaaggtatttggggaggataaaatgaggtttgctatgctgtctcagaagatatcgcaacatcttgctcctccaccgcccatcaacttggaacataagatcaagctatcagggaatggagcaaactcgagtgcttgctatgatgtattggtagatgttcctttcccactgcagaaggagatgacagcatttcttgccaatactgagaagcacaaggacattgaggcatgtgatgaggtgatatctgcttcaatcaagaagatccatgagcatcgtaggaggagggcgttcttccttgggttcagccagtctccagtggagttcattaatgcgttgatagcatcccagagtaaagatttgaagcttgttgctggtgaagcgagtaggaatattgaaagggaaaggcgtgcagacttctataaccagccatgggttgaggatgctgttataagatatttgaatcgtaaaccgcctggtggcaacgatggccctggtgctggtggttcttga

SEQ ID NO: 538 - protein, 525 aa, Triticum aestivum
MATGGNPNPNANPGQPRPQQQPPGSSPATPHNHMRPPTLGGSPFQGLFHTPPSHNPAFQIHMGAASSPQTPLMAAAAAAASAAASAKRPPQKPPSRPPAPTSNAAAASMAAAYKAANSGSVDLTPAARRNKKRKLPEKQLPDRVAALLPESALYTQLLEFEARVDAALARKKVDIQEALKTPPSLQRTLRIYVFNTFANQAPRTIPPPKNGDPPTWSLKIIGRVLEDGAELDPASVVPKHNPVYPKFSSFFKRVTIALDSSLYPENPLIVWENARSAAPQEGFEVKRKGDKEFLANIRLEMNYNPEKFKLSQPLMEVLGVEVDTRARVIAALWQYIKAKKLQNPSDPSYFMCDPQLKKVFGEDKMRFAMLSQKISQHLAPPPPINLEHKIKLSGNGANSSACYDVLVDVPFPLQKEMTAFLANTEKHKDIEACDEVISASIKKIHEHRRRRAFFLGFSQSPVEFINALIASQSKDLKLVAGEASRNIERERRADFYNQPWVEDAVIRYLNRKPPGGNDGPGAGGS

SEQ ID NO: 539 - DNA, 1548 bp, Zea mays
  misc_feature (61)..(61): n is a, c, g, or t
  misc_feature (91)..(91): n is a, c, g, or t
atgcatcagcagcagcagcagcctcaaacgggcggctcaccggcaacgcccatgacccacnttcgccctccctccctcgccggctcccccntccagggcytyttccacacgccgcccacccacaaccccgccttccagatccacatgggtgcctcgtcctcaccccagactccgctcatggccgccactgcaggatcggccaagcgccccccgcaaaagccccctgtccggcccctggcacccggctcaacctcgtcggccgcagcggcctcggcggctgccgcgtacaaggctgcggccgcggcggcggccgttgccaactctgggggcgtcgacctcacccccgccgcgcggcgcaacaagaagcgcaaactccccgagaagcagctccctgaccgcgtcgccgcgctgctcccagagtccgccctctacacgcagctgctcgagttcgaggcccgcgtggacgccgcgcttgcgcggaagaaggtagacatccaggaggcgctcaagacgccgccctcgctccagcgcacactccgcatctacgtcttcaacaccttcgccaaccaggggcctcgcaccatcccaccgcccaagaatgctgacccgccaacctggtcgctcaagatcattggtcgcgtgctggaggacggcgccgagctggatccttccagtgttgtgcccaagcacaacccagtgtaccccaagttctcccaattcttcaagagggtgactatagcgctggacccctctctgtacccagagaatccgctcatcatctgggagaatgcacggacagctgcccagcaggaagggttcgaggtaaagaggaaaggggataaagagtttgttgcaaacatccggctggagatgaactacaatcctgagaagttcaagctgtcacagccgcttatggaggtgcttggggtggaggtggacactcgcgcacgggtgattgctgccctctggcagtatattaaagcaaagaagcttcagaacccaaatgatccttccttcttcatgtgtgaccctcaattgaagaaggtgtttggggaggacaagctcaagtttgcaatgctgtcacagaggatatctcagcatctgtctgccccgccacccatcaatttggagcacaagattaagctgtcggggaatgaagcgcatagcagtgcttgctatgatgtgctggtggatgttcccttcccgctgcagaaagagatgatggcattccttgccaacacagagaagcacaaggacattgaggcctgcgacgaggtgatatctgcttcgatcaagaagatccatgagcatcgcaggaggagggccttcttcctgggtttcagccagtccccagtggagttcatcaatgctctgatagcttcccagagcaaagatttaaagctggttgctggcgaggcgaataggaacattgagaaagaaagacgtgccgacttctataaccaaccatgggttgaagacgccgttataagatacttgaaccgcaaaccggctaacgagggcctaggtggtggtgctggtggttcttga

SEQ ID NO: 540 - protein, 515 aa, Zea mays
  misc_feature (21)..(21): Xaa can be any naturally occurring amino acid
  misc_feature (31)..(31): Xaa can be any naturally occurring amino acid
  misc_feature (34)..(34): Xaa can be any naturally occurring amino acid
MHQQQQQPQTGGSPATPMTHXRPPSLAGSPXQGXFHTPPTHNPAFQIHMGASSSPQTPLMAATAGSAKRPPQKPPVRPLAPGSTSSAAAASAAAAYKAAAAAAAVANSGGVDLTPAARRNKKRKLPEKQLPDRVAALLPESALYTQLLEFEARVDAALARKKVDIQEALKTPPSLQRTLRIYVFNTFANQGPRTIPPPKNADPPTWSLKIIGRVLEDGAELDPSSVVPKHNPVYPKFSQFFKRVTIALDPSLYPENPLIIWENARTAAQQEGFEVKRKGDKEFVANIRLEMNYNPEKFKLSQPLMEVLGVEVDTRARVIAALWQYIKAKKLQNPNDPSFFMCDPQLKKVFGEDKLKFAMLSQRISQHLSAPPPINLEHKIKLSGNEAHSSACYDVLVDVPFPLQKEMMAFLANTEKHKDIEACDEVISASIKKIHEHRRRRAFFLGFSQSPVEFINALIASQSKDLKLVAGEANRNIEKERRADFYNQPWVEDAVIRYLNRKPANEGLGGGAGGS

SEQ ID NO: 541 - DNA, 1110 bp, Arabidopsis thaliana
atggaggacacgaagccaccattgggaggtaacaacaatcctcagcagcagcagcaacaacaacaacttctctatcaacaccaactacaacaacaacagagacaacaacaaatgcttctattgcagcaattgcaaaaacaacaacagcaacaagcagcaatgtctagattcccgtcgaacatcgacgtgcatctccggccaccggggttgattcagaaccgacccattaatcctccgcctcagcagaatcctacccctaaccctaatttgggacagcagacaccgaattttcaacagcagcagcagcagaatgtatcgagtcagcagatgatgcagcaacaacaacaacagcagcagcagcagaaattgatgaggccattgaatcacatcgagcttcaatgcgcttatcaggacgcttggcgtgtttgtcaccccaattttaaacaacccttctcttctctcgaagatgcttgcgagagattattaccttatcatgtcgtagcagattacgaagcagaagaggatgatagaatccttgattcagacccaacaggccaggccttgtcccgctctcaacaatgggataacaacattgctgcgaaagttgctgaattcacggcaacgtttgagaagcaagcactagcttttaacataataactcgaaagagagctatgggagaattcagatctgaggaaaggttgatggtagaacaagctttgctacaagatgaaaggaaagcgttgattgaactgaaagcagaaatggatagggagaaggctggccgggaggctcaggaggctaagctgcggatggcggctttagctcaagctggacagtctcaatctcatgctgagataatggctcgtaacccattaagggctaatgcggttggaaatcagggcagcaatattcagcttagccacgagatgggagaacagggacgtaacatgaaccctgatgagatgatgaatggatggggaaacaacagtcagagagaggacaaggaaccttcagaagatttcttgaatgatgaggagaatgagaatggagagacaggggaacaagaaaactggcgtgaagcaggagaatttgatttgaatagccggtaa

SEQ ID NO: 542 - protein, 369 aa, Arabidopsis thaliana; identical to SEQ ID NO: 46

SEQ ID NO: 543 - DNA, 1146 bp, Vitis vinifera
atggatgaggcgaacgccaaggcattggcgcagcatcagcagcagctcatgctgcagcaccagcagcagcaacagcagcaacagcttctccttcttcaacagctccagaagcagaagcagcagcatcagcagcagcaacagcagcagcaacagcaacagcagcagcaacagcaacagcagcagcagcaacagcaacagcagcaagcaatctcccggttcccttccaatattgacgcccatttgcgccctccaggcctccaccgccccatctcgctccaaccgcaaaaccccaaccccactcctaaccctaaccctaaccctaaccctaaccctatccccaatgtgcaaaaccctggccccgcaaatccgcagcagcagcagcagaaggtgatgcggcccgggcaccaggtggagctccagatggcgtaccaggacgcgtggcgggtctgccaccctgatttcaaacgtcctttctcttctctcgaggacgcctgcgagaggctactgccttaccatgtggtggcagactatgaagcagaggaggatgatagaatccttgactctgacactacaggccaaatgccgtcccgctctcagcaatgggaccacaatattgctgccaaagttgcagagttcactgccacatttgagaaacaggcccttgccttcaatatcatatcccgcaagagagccattggcgagtttcgatcagaggagaggttgatgattgagcaagcactcctgcaagaggagaaaagagcaatgctggaactgaggacagagattgagtcaagggagaaggctggacgagaggctcatgaggcgaagttgcgtatggcagcaatggttcaggcagagcaagcacgggcagagtcacaggcccatgctgagttgctggctcgagctccaataagggcgagtgcactcgggcctcagggcaatgacctcccaattggccatgatatggcagagcaggaacagggtgtcaacccagatgagatgatgaatggttggggaaacaacacacagagagatgagaaagagccatctgaggatttcttgaacgatgaggagactgaaaatggagacgcaggcatgcaagacgagtggcgtgaagttggagagtttgatctgaacaccagataa

SEQ ID NO: 544 - protein, 381 aa, Vitis vinifera
MDEANAKALAQHQQQLMLQHQQQQQQQQLLLLQQLQKQKQQHQQQQQQQQQQQQQQQQQQQQQQQQQQAISRFPSNIDAHLRPPGLHRPISLQPQNPNPTPNPNPNPNPNPIPNVQNPGPANPQQQQQKVMRPGHQVELQMAYQDAWRVCHPDFKRPFSSLEDACERLLPYHVVADYEAEEDDRILDSDTTGQMPSRSQQWDHNIAAKVAEFTATFEKQALAFNIISRKRAIGEFRSEERLMIEQALLQEEKRAMLELRTEIESREKAGREAHEAKLRMAAMVQAEQARAESQAHAELLARAPIRASALGPQGNDLPIGHDMAEQEQGVNPDEMMNGWGNNTQRDEKEPSEDFLNDEETENGDAGMQDEWREVGEFDLNTR

SEQ ID NO: 545 - DNA, 1203 bp, Ricinus communis
atgacgtcatttctagccttccacagacgccaaagcctgaaaactatcatctccattccgcctcagcagcagcaacatgcgcagcaccagcaacagcttctcttgcttcaacaattgaagcaagcacagcaagcacagcaagcacaacaagcacaaaaacaacagcagcagcagcatcagcaacatcaacaacaacaatcagccgcgatttcacgattcccatccaacattgacgcacacctccatcctccaggtctccatcgccaactcaatcttccgcagcagaaccctaaccctaaccctaaccctaataatcctaatcccaatttgcatcaccatcagcagcagcagcagcagcagcaaggatccaatttagggcaaaatgcgcagcaagtgcaacattctcagcagcagcagcagcatcagcaacagcaacaacaacagaaggggatccgacccccaattaatcaggtggagctccagatggcttatcaggatgcttggcgagtctgccatccagatatcaaacgtccattttcttctcttgaagatgcttgtgaaaggttactgccttaccatgtagtagcagactatgaagcagaagaggatgatagaattcttgactccgacacaacaggtcagatgccatctcgctctcagcagtgggatcacaacattgcagccaaagttgctgaattcactggtacatttgagaaacaggccctggccttcaacataataacccggaagagagctttgggtgaattccggtctgaggagagattgatgattgagcagatgcttctccaggaggagaaacggcttatgttggagttgaaaacagaaatggatgccagggagaaggctggtcgggaggctcagttgagaatggcagccatggttcaggcagagcaagctcgtgcagaatcacatgctcatgctgaaatgatggctcgagcaccaatacgagcaagtgcacttgggtctcaaggcaacaatgttcctattggtcatgacataggagatcaggaacatagtgtaacccctgaacagatgatgaatggctgggggggaaacaatgcacagagagatgagagagaaccttctgaagattttttaaatgatgaagagactgaaaatggagatactggtggccaaggtgagtggcgcgaagttggggaatttgatctgaataccagatga

SEQ ID NO: 546 - protein, 400 aa, Ricinus communis
MTSFLAFHRRQSLKTIISIPPQQQQHAQHQQQLLLLQQLKQAQQAQQAQQAQKQQQQQHQQHQQQQSAAISRFPSNIDAHLHPPGLHRQLNLPQQNPNPNPNPNNPNPNLHHHQQQQQQQQGSNLGQNAQQVQHSQQQQQHQQQQQQQKGIRPPINQVELQMAYQDAWRVCHPDIKRPFSSLEDACERLLPYHVVADYEAEEDDRILDSDTTGQMPSRSQQWDHNIAAKVAEFTGTFEKQALAFNIITRKRALGEFRSEERLMIEQMLLQEEKRLMLELKTEMDAREKAGREAQLRMAAMVQAEQARAESHAHAEMMARAPIRASALGSQGNNVPIGHDIGDQEHSVTPEQMMNGWGGNNAQRDEREPSEDFLNDEETENGDTGGQGEWREVGEFDLNTR

SEQ ID NO: 547 - DNA, 1028 bp, Solanum lycopersicum
agctactcctattgcagcagttccagcgtcagaagcagcagcagcagcaggatgcgatggctcgattcccttcgaacattgatgttcatctccgtcctcaacagctccttcatcgcccccttacccctcttcaatcacagaacccgaattcaaaccctaaccctaaccctagctctagcaataatccgtcaagccagatccccaatctacaaaacccgggtacttcccaacaacaacaacagcagcagcagcagcagaagttgacacgggttgccccggaatcgaaccgggtggagctccagatggcttaccacgacgcttggcgagtttgccatcctgattttaagcgtcctttctcttctcttgaagatgcctgcgaaaggcttctgccttaccatgtggtggcagactatgaagcagaggaggatgataagatcctcgattcagacactagtggccaaatgctctctcgttcacagcagtgggatcacaacattgctgtgaaagtttcagagtttactgcaacatttgagaaacaagtgcttgcgtttaatataatttcccgcaagagagatgttggagaattccgtaccgaggagaaactgatgttagagcagtcactgttgcaagaagagaggaaaagcctgcttgaattgaagacagagatggaggccaggcaaaagatgggtcgagagactcatgatcctaatttgcaaatggcagctcttgttcatgcagaacaagcccgtgctgaatcacaagctcgtgctgagatgatgaaccgagcgccaatacgagctagtgcacttgggcctagggggagcaatattcaaatgggtaatgatgtcggtgagcacggacaggaagttagccctgatgaaatgatcaacggttggggtaacaatggacataaagatgaaaaggaaccatcggaggactttttgaatgatgaagaaactgataatggagatgtaggtactcagagtgagtggcgtggaggtggggagctggatctgaacacaagatga

SEQ ID NO: 548 - protein, 366 aa, Solanum lycopersicum
MDEAKTLAQQQQQLMMQQQQQQQQQLLLLQQFQRQKQQQQQDAMARFPSNIDVHLRPQQLLHRPLTPLQSQNPNSNPNPNPSSSNNPSSQIPNLQNPGTSQQQQQQQQQQKLTRVAPESNRVELQMAYHDAWRVCHPDFKRPFSSLEDACERLLPYHVVADYEAEEDDKILDSDTSGQMLSRSQQWDHNIAVKVSEFTATFEKQVLAFNIISRKRDVGEFRTEEKLMLEQSLLQEERKSLLELKTEMEARQKMGRETHDPNLQMAALVHAEQARAESQARAEMMNRAPIRASALGPRGSNIQMGNDVGEHGQEVSPDEMINGWGNNGHKDEKEPSEDFLNDEETDNGDVGTQSEWRGGGELDLNTR

SEQ ID NO: 549 - DNA, 1071 bp, Sorghum bicolor
atggacgacgcagcgaatcccgcccctccaccgtccacctccactgctgcatccgcggcggccgcggccgcgcagcaccagcagctccagcgccaactcttcctaatgcagcaggcgcagtcccacccgcagcagctgtcgcagcaggccatgtcccgcttcccctccaacatcgacgctcacctccgccccctaggcccggttcgcttccaacagcctcagcagccccagccccagccccagccccagccgtcccactcccagggtccatctcagtcaccgttgcaggccgcgcagcaggcgtcgccccagcagcagcagcaggcggcggcggcgcaggcacaggcacaggtggcgcgggtacgaagccccgagatggagatggcgctgcaggacgccatgcgggtctgcaacccagacgtcaagacgcccttccagtccatcgaggacgttgtcaacaggttattgccttaccatgttgttgccgactatgaggctgaagaagatgacagaatccttgatagtgatacaacaggccagattccttctcgtctgcagcaatgggatcataacattctggtgaagattgctgagttcacgacgacatttgacaagcaagtattggcatataacataatgacaaagaaaagggccattggtgagttcaggtcagaggagcggctcatgctagagcaagccttgttacaggaggaaaagcaggctatgctgggactaagagcagagatggagtcgagagagaaagctggtcgtgaggctgctgaagtgaagatgcgtatggcaatggagcatgctcgtgctgaggcacaagctcactctgagatgttgaatcatggtcctataagggccagtgttgttgcttctcaaggggacaatggtccgagtcatgaaatggtgcaagaacatggtgaagatgggtggagaaattctcagagggatgatgaagagccatctgaggatttcctcaatgatgagaacgaacctgagaatgggaactcagatgggcatgaggactggcgcagatctggggagcttgatctgaactctaggtaa

SEQ ID NO: 550 - protein, 356 aa, Sorghum bicolor
MDDAANPAPPPSTSTAASAAAAAAQHQQLQRQLFLMQQAQSHPQQLSQQAMSRFPSNIDAHLRPLGPVRFQQPQQPQPQPQPQPSHSQGPSQSPLQAAQQASPQQQQQAAAAQAQAQVARVRSPEMEMALQDAMRVCNPDVKTPFQSIEDVVNRLLPYHVVADYEAEEDDRILDSDTTGQIPSRLQQWDHNILVKIAEFTTTFDKQVLAYNIMTKKRAIGEFRSEERLMLEQALLQEEKQAMLGLRAEMESREKAGREAAEVKMRMAMEHARAEAQAHSEMLNHGPIRASVVASQGDNGPSHEMVQEHGEDGWRNSQRDDEEPSEDFLNDENEPENGNSDGHEDWRRSGELDLNSR

SEQ ID NO: 551 - DNA, 1053 bp, Triticum aestivum
atggaggacgccgcgaacgccacccagactacctccaccacctcgtcggtggccgccgtagccgcggcggcccagcaccagcagctccagcgccagctctttctcatgcagcaggctcaggctcaggctcaggcgcaggcccagccccacccgcaggcgcagcagctgtcgcagcaggccatgtcccgcttcccgtccaacatcgacgcccacctccgccccctcggaccgcaccgcttccagcagccggcgccgtcgcagctccaaaccccaccccagccgcactcgcaggggcagccgcacccccagccgtccccgcagcaagcggcgcaggctagggtccggagccccgaggtggagatggcgcttcaggacgccatgcgggtctgcaacccggacatcaagacgcctttccattctctcgaggacgctgttagcaggttattgccttaccatgttgttgctgactacgaggctgaagaagatgacaggatccttgacagcgacgcaactggccagattccctctcgtcttcagcaatgggatcataacattctggtaaaaattgctgagttcacaacaacttttgagaagcaagtgttggcatacaacataatgaccaagaaaagggccattggtgagtttcgatcggaggagcgactcatgctagagcaagctttgttacaggaggagaagcaggcttcgatggaactaagagcagagatagaatctagggagaaagcaggccgcgaggctgctgaagctaagatgcgtatggccatggctgagcatgctcgagtggaagctcaagcacaccctgaggtgattggtcatggccctttgagggccaatgctgctgcttcccaaggcgatgatggtcctagtcatgacatggcacaacaacaggttgaagatggatgggaaaacactcaaagggatgatgatgatccatctgaggatttcctcaatgatgagaatgagccagagaatggaaactctgatatgcaagaggagtggcggcgatcgggggaatttgatctaaactctaggtaa

SEQ ID NO: 552 - protein, 350 aa, Triticum aestivum
MEDAANATQTTSTTSSVAAVAAAAQHQQLQRQLFLMQQAQAQAQAQAQPHPQAQQLSQQAMSRFPSNIDAHLRPLGPHRFQQPAPSQLQTPPQPHSQGQPHPQPSPQQAAQARVRSPEVEMALQDAMRVCNPDIKTPFHSLEDAVSRLLPYHVVADYEAEEDDRILDSDATGQIPSRLQQWDHNILVKIAEFTTTFEKQVLAYNIMTKKRAIGEFRSEERLMLEQALLQEEKQASMELRAEIESREKAGREAAEAKMRMAMAEHARVEAQAHPEVIGHGPLRANAAASQGDDGPSHDMAQQQVEDGWENTQRDDDDPSEDFLNDENEPENGNSDMQEEWRRSGEFDLNSR

SEQ ID NO: 553 - DNA, 1080 bp, Zea mays
atggacgacgccgcgaatcccacccctccaccatccacctccgccgcatccgcggcggccgcggcggcgcaacaccagcagctccagcgccaactcttcctaatgcagcaggcgcagtcccatccgcagcagctgtcgcagcaggccatgtcccgcttcccctccaacatcgacgctcacctccgccctctagggccgcttcgcttccaacagccccagccccagccccagccgtcccactcccagggtccatctcagtcgccgtcgcaggccacgcagcaggcgtcaccccagcagcagcagcagcaggcggcggcggcggcggcagcggcgcaggcacaagcacaggcccaggcccaggcggcacgggtacgaagccccgagatggagatggcgctgcaggacgccatgcgggtctgcaatccggacgtcaagacgcccttccagtccatcgaggacgctgtcaacaggttattaccttaccatgttgttgccgactatgaggctgaagaagatgacaggatccttgatagcgacacaacaggccagatcccttctcgcctgcagcaatgggaccataatattctggtgaagattgctgagttcacgacaacttttgacaagcaagtattggcatataacataatgaccaagaaaagggccatcggtgagttcaggtcggaggagcggctcatgctggagcaagccttattgcaggaggaaaagcaagctatgctgggactgagggcagagatggagtcgagagagaaagctggtcgcgaggctgccgaagtgaagatgcgtttggcaatggagcatgctcgtgctgaggcacaagctcactctgagatgatgaatcatggtcctataagggccagtgctgttgcttcgcaaggggaggatggtccgagtcatgacatggtgcaagaacatggcgaagatgggtggggaaattctcagagggatgatgaagatccatcggaggatttcctcaacgatgagaacgaacctgagaatgggaactcagatgggcaggaggactggcgcagatctggggagtttgatctcaactctaggtaa

SEQ ID NO: 554 - protein, 359 aa, Zea mays
MDDAANPTPPPSTSAASAAAAAAQHQQLQRQLFLMQQAQSHPQQLSQQAMSRFPSNIDAHLRPLGPLRFQQPQPQPQPSHSQGPSQSPSQATQQASPQQQQQQAAAAAAAAQAQAQAQAQAARVRSPEMEMALQDAMRVCNPDVKTPFQSIEDAVNRLLPYHVVADYEAEEDDRILDSDTTGQIPSRLQQWDHNILVKIAEFTTTFDKQVLAYNIMTKKRAIGEFRSEERLMLEQALLQEEKQAMLGLRAEMESREKAGREAAEVKMRLAMEHARAEAQAHSEMMNHGPIRASAVASQGEDGPSHDMVQEHGEDGWGNSQRDDEDPSEDFLNDENEPENGNSDGQEDWRRSGEFDLNSR

SEQ ID NO: 555 - DNA, 1584 bp, Arabidopsis thaliana
atggcgatttcaagtgtgggttttgcttgcagatccttttcccctgttcgtactctccagtctcactgcttatggaagatacggttcaacactgttgctgctgcaattgagacaatggatgagtcagatggttttgccacggacagtgatcgtcaagacaaggtttctgatgaaccaagggatcgtgagtggaaacaactgaattcgaaagatcttggactaagcagctcaatgattgcaaaatccacaagaaaagtgcttaatggccttaaaagcaaaggacatgatgtttaccttgtgggaggctgtgtacgagatcttattctgaagcggacaccgaaagacttcgatatacttacctctgcagaacttagagaggtggttcgaactttcccaagatgtgaaattgttggaagaaggtttcctatatgtcacgtacacattggagatgatttaatagaggtttcgagttttagtacctctgcacagaattcttcgagaaatacgagaactgaatgcaaagaatcgagtggctcagatggtgatgaggactgtatccgtttgaataactgtttgcagcgtgatttcacaattaacgggttgatgtttgatccatatgccaaagtcgtatatgactatttgggaggaatggaagatattagaaaagctaaagttcgaacagtgattcacgctggcacatcttttcaccaggactgtgctcggattcttcgtgcaataagaattgctgcgcgtttaggtttcagaatgtccaaagaaaccgctcattttattaagaacctttccttactagtacaaagacttgacaagggaaggatcttgatggaaatgaattacatgttagcttatggatcagcagaggcttctttgagattgctgtggaaatttgggatacttgaaattcttctaccaattcaggcagcatatcttgcacgcagtggtttcaggagacgtgacaaaaggactaacatgcttctgtctctctttgctaacttggataaattgttagcacctgataggccttgtcacagcagcttatggatagcaatcttggcgtttcacaaagcacttgctgataaacctcgaagtcctatagtggttgctgcgtttagccttgctgttcacaactgtggagatattctagaagctgtggaaatcacaaagaagatcactaggccacacgataaaagcttcttcgagctagtagagcccgaggagaatctcgacttccaaaccctgttggacgaggtcatggatcttgatgcttctatcgaagatgccttaaaccagatgactgatgcgtattttatatcgaaagctatgtcagcttaccctcaagcaccatattccgatttggtctttataccgttgcagctgtaccttagagcaggcagaatcttcgattgtgtgaaaaacgaagagacacgaattggatttgaggccaagcaaggaagcaagatcgagtatggttcgttaaattcaggatattttcccgaaattcggcatgtatttgcgagggttgtgttcgatactgtttttccattaaacctatctcaagaattgtaa

SEQ ID NO: 556 - protein, 527 aa, Arabidopsis thaliana; identical to SEQ ID NO: 48

SEQ ID NO: 557 - DNA, 1626 bp, Arabidopsis thaliana
atgttcaataagctttcttcaatggcgtatggttctttcggcgtctcatcaaaagctctagtctattgccgtccctgctatggctccattagagatctccctttctccctccgaacgtcaacaattggtcattgcggctgtgttggagctatcgcagcacctagaaatgttgtgaaacctcgcaaggaagaaagtcgtgattttagtggagcacggggaagtaataaggataaatcgatgccatggaagaagttagatgctaatgaatttggtattcagaggtcaatgataccagattctacacggatggttctcaataaactcaagaaaaaaggatttcaagtttacctagttggaggttgtgttcgggatcttattctagatagaatccccaaggattttgatgttatcactactgctgaactcaaggaggtacggaaagtatttcccggctgtcaaattgttggaagacgatttccaatatgtcatgtttatgttgatgatattatcatagaggtgtcaagttttagtacttcagcaaggactggtaaagcgcccaataaaagctttagacggcctgcgggatgcgatgagcgggattatattcgttggaagaattgcttacagcgtgattttacagtcaacgggttgatgtttgatccatcggagaatgtagtgtatgactatataggaggagttgaagatttaaggaattctaaagttagaacagtatccgcagcgaatctttcatttgtcgaggatacagctcgcattttacgtgcaattaggattgcagcaaggttaggattcagcttgactaaagacgttgctatttctgtgaaggagctttcttcttcattactgagacttgacccttcaaggattcggatggaaatcaattatatgctggcatatgggtccgcagaagcttctttacggttattatggagatttggcctcatggaaattcttctacctatccaggcatcttatcttgtttcccaagggttccggaggcgtgatggaaggtccaacatgcttctgtcgctatttcgcaaccttgaccgacttgtagcacctgatcgaccatgcagcgagttcctctggattgggatcttagcattccacaaagcattagtcgatcagcctcgggatcccacggtagtagcttccttctgccttgccatctacagtgaagtatctttatcagaagccatcgcaattgcaaggagcaactcaaaacaacacaactcacacttccaagaattgtccagtcctgaaaaggacactgctgactcagagagcaaaatatcgcagcaggtcataaaattagcagagtctataagatcagctgcgcggaaattgaataaccgagactacatagctaacgcaatgagcaaatacccgcaagcaccgggctctgatatggtattcttgtcaagacttatgttggagagagtagagaaaatgtttggaaatgtgagaagaaaaggaaaccaagagagagatgatgtcccaagtttagagcgtaggataaactacaagtctcttgcccttggagactttcatgagacacgtcgtgtttttgctaggattgtctttgataccatttaccctctggcctaa

SEQ ID NO: 558 - protein, 541 aa, Arabidopsis thaliana
MFNKLSSMAYGSFGVSSKALVYCRPCYGSIRDLPFSLRTSTIGHCGCVGAIAAPRNVVKPRKEESRDFSGARGSNKDKSMPWKKLDANEFGIQRSMIPDSTRMVLNKLKKKGFQVYLVGGCVRDLILDRIPKDFDVITTAELKEVRKVFPGCQIVGRRFPICHVYVDDIIIEVSSFSTSARTGKAPNKSFRRPAGCDERDYIRWKNCLQRDFTVNGLMFDPSENVVYDYIGGVEDLRNSKVRTVSAANLSFVEDTARILRAIRIAARLGFSLTKDVAISVKELSSSLLRLDPSRIRMEINYMLAYGSAEASLRLLWRFGLMEILLPIQASYLVSQGFRRRDGRSNMLLSLFRNLDRLVAPDRPCSEFLWIGILAFHKALVDQPRDPTVVASFCLAIYSEVSLSEAIAIARSNSKQHNSHFQELSSPEKDTADSESKISQQVIKLAESIRSAARKLNNRDYIANAMSKYPQAPGSDMVFLSRLMLERVEKMFGNVRRKGNQERDDVPSLERRINYKSLALGDFHETRRVFARIVFDTIYPLA

SEQ ID NO: 559 - DNA, 2646 bp, Arabidopsis thaliana
atggcggttttaagtgtgggtttcttcgcttgcagatcccattttcctgttcttcccctgttttactgtttctcgaaggttcagctcaacactgttgctgctgcaatggagactgtggatgacaaagacagtgatcatcatcatgacaagggttctaataagacgagtaaagcaccagagtggaagaaattgaattcaaaagaccttgggataaccacttctatgatttcaaagcctacacgaatagtgctaaatggccttaagagtaaaggatatgatgtttaccttgtgggaggctgtgtacgcgatcttattttgaagcggacgccaaaagacttcgatatactcacttctgcggaacttagagaggttgttcggagtttctcaagatgtgaaataattggaaaaaaatttcctatatgtcatgtgcacattgggaatgatatgatagaggtttcgagttttagcacctctgctcaaaattctctaagaaacacaagaacgggttctggaaaatctaatggttcctatgacgaggacagtatccgtttcaataactgcttgcagcgtgatttcacaattaatgggttgatgtttgatccatatgccaaagttatatatgactatcttgggggaatagaagacattaaaaaagctaaggtacggacagtgtttcatgctggcacatcatttcaagaggacagtgccaggattcttcgtggaacaagaattgctgcgcgtttaggttttacaatttccaaggaaacagctcatttcttaaagaacctttccttcctagtacaaagactccacaggggaagaatcttgttggaaatgaattacatgttagcgtatggatcagcagaagcttctttacgattgttgtggaaatttgggatactagaaattcttttaccaattcaggcagcatatctcgttcgcactggtttcaagagacgcgacaaaaggagtaacttgcttctgtctctcttcggaaatttggataaattgttggctcctgataaaccttgccacagcagcttatggctaacaatcttggctcttcacaaagcacttgctgatcaacctcgatatccttcagtggtagccgcgtttagccttgctgtccacaatggtggagatgttttagaagctgtaaaaaataccaggaaagtcacaaagccacataatagaagcttctttgagctactggagccagaggaaatggactcccaaaccttgttggatgaagtcatggattttgattcatctatcaaagaagccttgggacagatgactgatgggaggtttatttccaaggctatggcagcgtaccctcaggccccatattccgatatggttttcataccgttgcaattgtacctagatgcaagacgaatattcgagtgtgtgaaagaaaatgggcagaagggatttgtgcctaagcaagacagtaagcgagagccagaagatgatttggagaccaaaccgattctgaagaaacataaggaaaattccgaggaggagaacaaggagcagatcaaaggaacggtcgagttgttggagacaaaatctgatcaggctccagtgaaggagacagtggaaggacttgatgaaactcccgattctgttgaggtacctaagaagtatatgtctggtcttttgattcgttgctttccctcaagaaaaaagacgctctatgtttgctgtctccctcgcgacactaaaatgccagatatcatcgatttcttcaaagatgttggacaagttgttagtgttcaacttactacaaaacgcaacggtttgcgtttgtccactggcttcgttgagtttgcttctgctaacgaagcaaagaaggcgctggatatgaagaatggtgaatatttgtgtggtaataagcttattcttggcatggctagctgcgaaaatattgcacaacccaagtacgaagactacattcaacaagaaagccttccgattgaagaagaggagacacctcccaaaattgttcagagtggcgctaacacacttggctgttccattcaggcagctgctttttccatgactgatattttatccttccacttttacagactcgatttcttcaatgatgttggagaagttgttagtgttcgacttattgtaagccccgagagtaagcatgtgggctatggctttgttgagtttgcttctccttgcttagcaaacatggcgctggaaaagaagaatggtgaatatttgcacgatcataagatttttcttggtgtggctaagacagctccgtaccctccacgaatcaagtacaaccttgcagagaagctttggtacgaagactatcttctacgagatagccttctgatagaagaagatgagacagtggaaggacttgatgaaactcctagttgtgttgaggcagttgccttaagagaaaaggtgctcattattgcgcatgtccctcgccgaacaaaaatatcacatatcatcgatttcttcaaagatgctggacaagttgttaatgtccgacttattgtagaccaaaagggcaagccttttggccgtggctttgttgagtttacttctgctgacgaagcaaagaaggtcagattagtttatagtaatgatgaaaagtattttactagtcattag

SEQ ID NO: 560 - protein, 881 aa, Arabidopsis thaliana
MAVLSVGFFACRSHFPVLPLFYCFSKVQLNTVAAAMETVDDKDSDHHHDKGSNKTSKAPEWKKLNSKDLGITTSMISKPTRIVLNGLKSKGYDVYLVGGCVRDLILKRTPKDFDILTSAELREVVRSFSRCEIIGKKFPICHVHIGNDMIEVSSFSTSAQNSLRNTRTGSGKSNGSYDEDSIRFNNCLQRDFTINGLMFDPYAKVIYDYLGGIEDIKKAKVRTVFHAGTSFQEDSARILRGTRIAARLGFTISKETAHFLKNLSFLVQRLHRGRILLEMNYMLAYGSAEASLRLLWKFGILEILLPIQAAYLVRTGFKRRDKRSNLLLSLFGNLDKLLAPDKPCHSSLWLTILALHKALADQPRYPSVVAAFSLAVHNGGDVLEAVKNTRKVTKPHNRSFFELLEPEEMDSQTLLDEVMDFDSSIKEALGQMTDGRFISKAMAAYPQAPYSDMVFIPLQLYLDARRIFECVKENGQKGFVPKQDSKREPEDDLETKPILKKHKENSEEENKEQIKGTVELLETKSDQAPVKETVEGLDETPDSVEVPKKYMSGLLIRCFPSRKKTLYVCCLPRDTKMPDIIDFFKDVGQVVSVQLTTKRNGLRLSTGFVEFASANEAKKALDMKNGEYLCGNKLILGMASCENIAQPKYEDYIQQESLPIEEEETPPKIVQSGANTLGCSIQAAAFSMTDILSFHFYRLDFFNDVGEVVSVRLIVSPESKHVGYGFVEFASPCLANMALEKKNGEYLHDHKIFLGVAKTAPYPPRIKYNLAEKLWYEDYLLRDSLLIEEDETVEGLDETPSCVEAVALREKVLIIAHVPRRTKISHIIDFFKDAGQVVNVRLIVDQKGKPFGRGFVEFTSADEAKKVRLVYSNDEKYFTSH

SEQ ID NO: 561 - DNA, 1503 bp, Medicago truncatula
atggcaatttcgaccttaaaattagtctgcaaacccaatcttcttcatcttcgtcctatcccatcccaatgtgtccgcaaggttgtaccaagatccgtaccttctgttgagccagaggagttaaataagaaggcaccggcatggaagaagatgaattcaaaagagcttggatttcgaaattccatgattgctagtccaattaaaaaggttctcaacatgttgaagaaaaagggaggttgtgtccgggacatgatactaaggcaaacaccaaaagattttgatattttaacttcagcggatcttaaagaggtgatgagaacattttcatggtgtgagatagttggtaaaaggttcccaatatgtcacgttcatatggatggtatcatcgttgaggtttcaagttttaacactgccaaacgcaagcctggcagacacttcgctcatgatattgaggcacccaagggatttgacaaggaggactatcttcgttggaggaattgtgtgaatagagattttacaattaacgggttcatgtttgatccatttgcaaaaattgtatatgattacatgggaggaatggaagatattataaaagctaaagtccgaactatggttcctgcagctacttcttttcaagaggattgtgctcgcattcttcgtgcaattagaattgctgctcgcttggggtttagtatttcaactgaaaccgctcgttctgttaaacatctttcatattcaatattaagacttgataagggtaggctcctgatggaaatgaattatatgctagcatatggatctggtgaggcttctttgaggctattatggaaatttggacttctagatattcttcttccctttcaggctctttactttgttcgtcatggatttcgaagacgggacaaaagaaccaatatgcttttgtctttgttcttcaatttggataaacttttggctcctaacagtccgtgtcatagcagcttatgggttggtatccttgcattgcataaatctttaagtgatcaaccgaggaatcccttggtgattgctgcatttagccttgctgttcataatggtggaaatttgttggaagcagtagacatagctaggaggataaacaaaccacacgacatcagatttcctgaattatcagatccttgcgatctgaatgcaaaggctttggaaaatgagattctggatcttgtagagtctgttaaagtgtcactgttgcagatgacatctaggcactcggtagctcgagctatggttgactatccacaagcccctcattcagacatggtgttcatcccattaggaatgtacctaaaagctctaagcatttttgactgtctgaaagtaagttcttgcaagaaattcttgtccaagaaaagcagaaaaattgattacgaatccttagctcgtggtgacctgccagaaatacgacacttgtttgcaagggttgtatttgacactgtatatccactacaccttggtcagtcctaa

SEQ ID NO: 562 - protein, 500 aa, Medicago truncatula
MAISTLKLVCKPNLLHLRPIPSQCVRKVVPRSVPSVEPEELNKKAPAWKKMNSKELGFRNSMIASPIKKVLNMLKKKGGCVRDMILRQTPKDFDILTSADLKEVMRTFSWCEIVGKRFPICHVHMDGIIVEVSSFNTAKRKPGRHFAHDIEAPKGFDKEDYLRWRNCVNRDFTINGFMFDPFAKIVYDYMGGMEDIIKAKVRTMVPAATSFQEDCARILRAIRIAARLGFSISTETARSVKHLSYSILRLDKGRLLMEMNYMLAYGSGEASLRLLWKFGLLDILLPFQALYFVRHGFRRRDKRTNMLLSLFFNLDKLLAPNSPCHSSLWVGILALHKSLSDQPRNPLVIAAFSLAVHNGGNLLEAVDIARRINKPHDIRFPELSDPCDLNAKALENEILDLVESVKVSLLQMTSRHSVARAMVDYPQAPHSDMVFIPLGMYLKALSIFDCLKVSSCKKFLSKKSRKIDYESLARGDLPEIRHLFARVVFDTVYPLHLGQS

SEQ ID NO: 563 - DNA, 1629 bp, Oryza sativa
atggcgctgcgcacgccggagctgcgcttcgccgccgcggcggggctcggggcgctctcgcgcccatcccgcgtcgcgccgtccccgctcgccgcgctggcggcgccgcgccggcgcaggcgccgctccccgtcgccctcccccgcgccctccgactccgactccaaccccgcctcctccgcccccgcgaacgccggtggggcggcggcggcggcggaggcgccggagtggaagaaggtgagcgcgaagcggttcgggatcaaggactccatgatccccgacgaggcctggaacgtcctccaccgcctccgcagcagaggatatgatgtctacctggttggtggttgtgttcgagatctcataatgaagaaaaccccaaaagattttgacataataaccacagctgatcttaggcaggtgaaagacactttctcaggatcagctgttatagtaggaaggcggttcccaatatgtcatgtatatgagaacaattcaattgttgaggtatcaagttttaacacttatgcacgagggtcaactagcaatcaaatttacacgtccaagagcccccattgtagcaaaaatgattatatccgatggaaaaattgccaagggagggacttcactataaacgggttaatgttcaatccatatgcagaaaagatctacgactacttcggaggaatcgaggatattaagaaagctaaggttcgtaccgtgattccagctggcacatcattccaggaggactgtgctcgtattctacgtgcaatcagaattgcagctcgtttagggttcaactttccaaaagaaactgcttattatgtgcgaactcttgcctgctctgtggcaagacttgataagggaagaatactcatggagatcaactatatgcttgcttatggttcagctgaagcttctttaaggttgctttggagattcggtcttcttgaacacctgctgccttttcaggcagcatatttttcttcaactcgttttaagaggaaggataaaggaactaacatgctactggtcttattttctaaattggataattttcttgctcctaacaggccatgccataatagtttgtggataagtattttagcacttcatgaagcattagtacgccaaccgcgtgatcctttagtggtagctacttttgccctagctctataccttggaggtgatatgtcattggcactagatattggaaaatcaatcaaccgtcaacataataccggattttcagagctattagaaccccaagtctgggatgataagcatttggtaggcgaggtgcaaagcctagctgtctcaatgcggcgggcattaactgaaatgactgatgaatattttgttgcaaatgctatggcaaaaattcctcaggcaccatcctcagatcttgtattcatcccactacaagcctacctaaaggttctcaaattaattgaatgtgttcaacatgggaaaaaggagcatggctatgaaccgaagagagatggaaatattgattatcatgatctatcttatggtacacctgcagaagtaagaaatgtctttacactggtcgtcttcaacacattatacccctcaaatacggagaatcagcaggatgtcagctcttga

SEQ ID NO: 564 - protein, 542 aa, Oryza sativa
MALRTPELRFAAAAGLGALSRPSRVAPSPLAALAAPRRRRRRSPSPSPAPSDSDSNPASSAPANAGGAAAAAEAPEWKKVSAKRFGIKDSMIPDEAWNVLHRLRSRGYDVYLVGGCVRDLIMKKTPKDFDIITTADLRQVKDTFSGSAVIVGRRFPICHVYENNSIVEVSSFNTYARGSTSNQIYTSKSPHCSKNDYIRWKNCQGRDFTINGLMFNPYAEKIYDYFGGIEDIKKAKVRTVIPAGTSFQEDCARILRAIRIAARLGFNFPKETAYYVRTLACSVARLDKGRILMEINYMLAYGSAEASLRLLWRFGLLEHLLPFQAAYFSSTRFKRKDKGTNMLLVLFSKLDNFLAPNRPCHNSLWISILALHEALVRQPRDPLVVATFALALYLGGDMSLALDIGKSINRQHNTGFSELLEPQVWDDKHLVGEVQSLAVSMRRALTEMTDEYFVANAMAKIPQAPSSDLVFIPLQAYLKVLKLIECVQHGKKEHGYEPKRDGNIDYHDLSYGTPAEVRNVFTLVVFNTLYPSNTENQQDVSS

SEQ ID NO: 565 - DNA, 1518 bp, Oryza sativa
atgacgacgccacgacggcgcgctgacccatcgcccccgcctgctcgccgcctcctccaccgcctcggctccgcggcctccggtctgcagacgctggcgtacagctcgaagaaggaaggcggcggcggcgacatgggcccacgcaacggcggttcctcttctaatagaagaccaggatttgttgattcttcttcatggagatattttgactcgagggttgttggtattactagaggggatatacctcgccatgcctggactgtcctacacatgctaaaacgaaaagggtttgcagcttatcttgttgggggatgcgtgagagatttgctactgaaaagggcacctaaagattttgatgtgattactaccgcaagcctccagcagattaagaaaatggttttccaacgatgtataattattggcaaacgctttccaatatgccagcttaatatgtatggcacaaaaattgaggtttctagctttagcacgaatgcaaatcatgtgaaaggaagtaaaaatataggatgttcagaggagtttaaacgttatgatgagggggatattcttctctggcagaattctatgaaaagagactttacaataaacagcttattctttaatccatttaactttaagatttatgattatgtgaatggagtaagggatattagcaaaaacaaggtgtctacagtgattcctgcccgtgtttcattcaaggaagaccctgccaggattttgcgtggcttgagaattgctgctcgccttggttttgagttctccagtgaaacttctgctgcaatacgggaactttctttgtccataacagatattgacaaggcaagattaatgatggaattgaattatttattgtcttatggggcagcagcttcttctcttaggttacttagaaaatatggacttctcgattttttgctgcctttccaggcagcatatatgtcggatcagatgaaggataaatcaaatgacacagatttaatgctcatgaaactactggctaatcttgataaattactctctgctgatcagccatgcccctcctgtttgtggttagcactgttgacatttcacagtgcattggtaaattctccacatgatgcccaggtaatcagggcttttgctgcactaatgtattttggatcatgggagggcgcagtcaacttcttgaatcaagacattggagcaccagccccgtttattccagaaacactagggccttctcggagcaaactggagaatctcatggaacaaacatcacatttagcatcactagtcaagtcgtcagttgatacgttgacatctatagatgctctccaacaatcactggccaaatactcaaaggcttcacaagtttcaggactggtgcttgtatctagcagagagagggagagagtgttgagaatatttgagggccttgatactgacttaacttcatatgaagggacaagagggatgcaggaaattgattataagttactgaaggatgggcaccctgtgtga

SEQ ID NO: 566 - protein, 505 aa, Oryza sativa
MTTPRRRADPSPPPARRLLHRLGSAASGLQTLAYSSKKEGGGGDMGPRNGGSSSNRRPGFVDSSSWRYFDSRVVGITRGDIPRHAWTVLHMLKRKGFAAYLVGGCVRDLLLKRAPKDFDVITTASLQQIKKMVFQRCIIIGKRFPICQLNMYGTKIEVSSFSTNANHVKGSKNIGCSEEFKRYDEGDILLWQNSMKRDFTINSLFFNPFNFKIYDYVNGVRDISKNKVSTVIPARVSFKEDPARILRGLRIAARLGFEFSSETSAAIRELSLSITDIDKARLMMELNYLLSYGAAASSLRLLRKYGLLDFLLPFQAAYMSDQMKDKSNDTDLMLMKLLANLDKLLSADQPCPSCLWLALLTFHSALVNSPHDAQVIRAFAALMYFGSWEGAVNFLNQDIGAPAPFIPETLGPSRSKLENLMEQTSHLASLVKSSVDTLTSIDALQQSLAKYSKASQVSGLVLVSSRERERVLRIFEGLDTDLTSYEGTRGMQEIDYKLLKDGHPV

SEQ ID NO: 567 - DNA, 1752 bp, Physcomitrella patens
atgctaagtgaggcaattgcgatgcaaggctcagtggcgacgagagcggctcttcttcgtaactctttccattgcctccgatctctcaactgtggagagtttcgatccagaagtctggctcccagctccagcgagcttctccgcagttcagtcgagattttcaggagtcaagttgcagaattcgctccatattctactgcagtaccagcaggaaaaccaattcaggtgcaactgcggattttaaagaaagatgagcatggactacgggacaaacttattccagcttcgtcctggcgcgttctcactcggctacttgatgcagggtacaggagctaccttgttggcggcagtgtacgtgatatgttggtaaagcaggtccccaaagattttgatatcctcaccacagcagaaccaaagcaggtcaaggcggctttttctggtcggtgcattattgttgggagacgatttcctgtatgccatgttacctcgttgaacacagttgttgaggtttcaagcttcagcacaaattcgggaaatatcaagaggattacgtatgaacctgttgtcggaactgagggatggagtgaggacgatttctcccgatgggacaattccctgcgaagagatttcactgtcaatgggatcatgtatgacccatttaaatgtatcatatatgactacgttggtggcttacgagatctgaggagatgcaagattcggactgttatccctgcactcgagtcttttgaagaggattcagcaagaattttaagggcaattcgtattgcggcccgtctagaattttcctttgcaaccagcactgcaaatgcaatcagacaattaaaatcgtccatattgacattgaacaagacaagattgcagttggaagtgaacacaatgatggcatatggttcttcagagcgttctgtcagactgttgtggagatatggtgtccttgagtacttgcttccctttcaggcaaggcaacattttggtcttcttgctcgatatttctcaaatacaaatcttaagcgccaggcacgtcggtcagatattcttttgataatttttaaagcacaatccgtctgtttagtaatctacctcgttttctttcgttctgcatttgtagctattcagaagctgcttgcgaatttggacaaagttacggctccaaatcgtccttgtcatggtggactttgggttgccattcttgcatttcatcttgctttggtcgaaagaccttggagtcttactgtggggcctactgttgcattggctttgtcattcggcactggcttggagaaggccataactcaagtacaaaaattgtgtgacgctgttgacaagaacggtaaacatctgtggaatgatcaattcaggtcatgtgtaaaggagatggatgaagtagtcattttaaacgattgtcaaagttttgtggatttgtgcctcaacaatgtggctcaacttcacagcgctgcagcgacatgcaaggtgatgcaggaattgaacatttcaagtcctccttcagattggggcgttgtctccaaaccctatttttacaaggcaaaccacctattcaatagagctctaacttctaattcagatgattttccagatattgttcatgatacatacaaaggtgtacttatgaacagctccttttccacaaatggaggtatagaggatttaggtaatgttttttctcatgttgtattgagcaccttatttccttcagtttcgagttctctgtaa

SEQ ID NO: 568 - protein, 583 aa, Physcomitrella patens
MLSEAIAMQGSVATRAALLRNSFHCLRSLNCGEFRSRSLAPSSSELLRSSVEIFRSQVAEFAPYSTAVPAGKPIQVQLRILKKDEHGLRDKLIPASSWRVLTRLLDAGYRSYLVGGSVRDMLVKQVPKDFDILTTAEPKQVKAAFSGRCIIVGRRFPVCHVTSLNTVVEVSSFSTNSGNIKRITYEPVVGTEGWSEDDFSRWDNSLRRDFTVNGIMYDPFKCIIYDYVGGLRDLRRCKIRTVIPALESFEEDSARILRAIRIAARLEFSFATSTANAIRQLKSSILTLNKTRLQLEVNTMMAYGSSERSVRLLWRYGVLEYLLPFQARQHFGLLARYFSNTNLKRQARRSDILLIIFKAQSVCLVIYLVFFRSAFVAIQKLLANLDKVTAPNRPCHGGLWVAILAFHLALVERPWSLTVGPTVALALSFGTGLEKAITQVQKLCDAVDKNGKHLWNDQFRSCVKEMDEVVILNDCQSFVDLCLNNVAQLHSAAATCKVMQELNISSPPSDWGVVSKPYFYKANHLFNRALTSNSDDFPDIVHDTYKGVLMNSSFSTNGGIEDLGNVFSHVVLSTLFPSVSSSL

SEQ ID NO: 569 - DNA, 1548 bp, Populus trichocarpa
atggcaatttcaagcttaagctttgcttgtagacccggttttcctcttaggccatctctttttcaccgcattcaaaaagttcggttcagctcagttgcagcaattgaaacccttgatgttcaagagaatgttatcaaaggcaacagtcgaaacttgggggactgtaaggcgccggagtggaagaaattgagttccaaggaacttggactcagtaattcattgatttcaatgcctacaaagaaggtccttaatgggcttaagaaaaatggatatgaggtttatctcgtgggaggttgtgtccgggatcttattttaaagagaataccaaaggattttgatataatcacatcagctgagcttaaagaggtagtaaggacattttcacattgtgaaatagttggcaaatggtttcccatatgtcacgtgcatgttggggatactattgtggaggtttcgagttttagcaccacaggacggaagttcaaggtggatttgagaaatgacatcatttgtcccattgattgtgatgagaaggattatgttcgttggaagaattgtttgcagagggacttcacaataaatgggttgatgtttgatccatataaaagaatagtgtacgattatatgggaggtctggaagatattaaaaaggctaaagtgcgaactgtgatcccagctggtatttcttttcaagaggactgtgctcgcattctgcgtgcagtaagaattgctgctcgtttaggattccgttttacaagggaaacagctcactttgtaaaaaatctttctcgcttgttattaagacttgacaagccaagaatcatgatggagatgaactacatgctagcatatggttctgctgaagcttctttgaggatattatggaaatttggacttcttgaactacttctgcccatccaggcagcatattttgttcgtgatggttttaagagacgggataagagaagtaacatgcttctgtgtctgttttctaacttggataaactccttgcacctgataggccatgccacagcagcctatgggttggaatcttagcattccataaagcattagctgaccaaccaagggatcctatggtagtggcagcattttgtctagctgttcacaatggtggggatattttaggaggagtaaacatggcaaggaagatcaccaagccacatgacatcagctttcatgagttaacgaaacctcaggatctggactctaagatgctgattgatgaggttgtggattttgctgcatctgttaaacaagttttaaattggatgaccgatgagtattatgtttcactggcaatggcagagtaccctcaagcaccatattcagatttggtattctttccgttggcagtgtatttaagagtgtgccggatttttgagtgctcaagagatggcccggaaaaaggttttctgccaaagcaaggtagaaagatcgattacgagatgttgggtttgggaggcctgcaggaagttcggcatacttttgcgagggttgtttttgatactgtgtacccggttaattaa

SEQ ID NO: 570 - protein, 515 aa, Populus trichocarpa
MAISSLSFACRPGFPLRPSLFHRIQKVRFSSVAAIETLDVQENVIKGNSRNLGDCKAPEWKKLSSKELGLSNSLISMPTKKVLNGLKKNGYEVYLVGGCVRDLILKRIPKDFDIITSAELKEVVRTFSHCEIVGKWFPICHVHVGDTIVEVSSFSTTGRKFKVDLRNDIICPIDCDEKDYVRWKNCLQRDFTINGLMFDPYKRIVYDYMGGLEDIKKAKVRTVIPAGISFQEDCARILRAVRIAARLGFRFTRETAHFVKNLSRLLLRLDKPRIMMEMNYMLAYGSAEASLRILWKFGLLELLLPIQAAYFVRDGFKRRDKRSNMLLCLFSNLDKLLAPDRPCHSSLWVGILAFHKALADQPRDPMVVAAFCLAVHNGGDILGGVNMARKITKPHDISFHELTKPQDLDSKMLIDEVVDFAASVKQVLNWMTDEYYVSLAMAEYPQAPYSDLVFFPLAVYLRVCRIFECSRDGPEKGFLPKQGRKIDYEMLGLGGLQEVRHTFARVVFDTVYPVN

SEQ ID NO: 571 - DNA, 1446 bp, Populus trichocarpa
atggtttttgtttcattgttttcttgcagattggagttttctttttcaggggatcctaaggcgctggagtggaagaaatggaattccaaggaacttggaatcagtaattcaacgatttcaaggcctacaaagaaggttcttgatggacttaagaaaaatggatatgaggtttatctggtgggaggctgtgtccgggaccttattttaaagagaacaccgaaggattttgatataatcacatcagctgagcttaaagaggtagtaaggacatttccgcagtgtataatagttggcaagcggtttcccatatgtcacgtgcacgttggggatactattgttgaggtttcgagttttagcaccacgggaccgaagttcaggttggatttgagcaatggcatcagtcctcccattgattgcgatgagaaggattatgttcgttggaagaattgtttgcggcgagacttaacaataaatgggttgatgtttgatccatataaaagaatagtgtatgactatgtgggaggtctggaagatattaaaaaggctaaagtgcggactgtggtcccagctagtacttcctttcaagaggactgtgctcgcattctgcgtgcagtaagaattgctgctcgtttaggattccgttttacaagggaaacagctcactttatcaaaaacctttctcgctcgttattaagacttgacaatcaaaggatcatgatggagatgaactacatgctagcatatggttctgctgaagcttctttgaggatattatggaaatttggacttcttgaacttcttctgcccttccaggcagcatactttgttcgtgatggatttaagagacaggacaagagatctaacatgcttttgtgtctgttttctaacttggataaacatcttgcacctgataggccatgccacaacagcttatgggttggaatcttagcgtttcataaagcattatctgaccaaccaagggatcctatggtggttgcagcattttgtcttgctgtccacaatggtggagatattttaggaggggtaaaaatggtgaagaagttcaccaagccccatgatgttagcttccatgagttatccgaacctcagaatcttaactctgaagcactggttgatgaggttgtggatttcgcagcgtctgttaaacaagttctatattggatgaccgatgagtattgtgtttcacaggcaatggcagagtaccctcaagcaccatgttcagatttggtattctttccattggcagtgtatttaaaagtgtgcaggatttttgagtgttcaagagagggctcacagaaagtatttatgccaaagcaaggtagaaagattaattatgagatgttggctttgggaagcctgcaagaagttcggcatacttttgcgagggttgtctttgatactgtgttcccgctcaatttaacctaa

SEQ ID NO: 572 - protein, 481 aa, Populus trichocarpa
MVFVSLFSCRLEFSFSGDPKALEWKKWNSKELGISNSTISRPTKKVLDGLKKNGYEVYLVGGCVRDLILKRTPKDFDIITSAELKEVVRTFPQCIIVGKRFPICHVHVGDTIVEVSSFSTTGPKFRLDLSNGISPPIDCDEKDYVRWKNCLRRDLTINGLMFDPYKRIVYDYVGGLEDIKKAKVRTVVPASTSFQEDCARILRAVRIAARLGFRFTRETAHFIKNLSRSLLRLDNQRIMMEMNYMLAYGSAEASLRILWKFGLLELLLPFQAAYFVRDGFKRQDKRSNMLLCLFSNLDKHLAPDRPCHNSLWVGILAFHKALSDQPRDPMVVAAFCLAVHNGGDILGGVKMVKKFTKPHDVSFHELSEPQNLNSEALVDEVVDFAASVKQVLYWMTDEYCVSQAMAEYPQAPCSDLVFFPLAVYLKVCRIFECSREGSQKVFMPKQGRKINYEMLALGSLQEVRHTFARVVFDTVFPLNLT

SEQ ID NO: 573 - DNA, 1687 bp, Vitis vinifera
atggcgattgctgttcttggattttcctgtagaagttacctcactttccgtcgtcctctcgtctactgcgttcacaaggttcgacaccgcagcaatgttgcaactgttgaatcgcctcctgaaccagtgggtgttacgaaggaagaagaacctcattgggctacttctgatggaagaggtaatggtgcttctaaggcacctgaatggaagaagttgaattctaaagacctcgggattaggacgtcgatgattgcaaagcccacaagatatgttttaaatggacttaaaaaaaaaggatatgaagtgtaccttgttggaggttgtgtacgggaccttatcctgaagagaactcctaaagactttgacatcataacttcagctgaacttaaggaggtactgagagcatttccccgatgtgaagtagttggaaagcgatttcccatatgccatgtgcatgtcaatgataccattgttgaggtttcaagttttagcacttctggaaagagaaccggtaggaaacttgattatattctcagaagacctcctgattgtgatgatcatgattatattcgctggaggaattgtctacagcgggactttactattaatgggttgatgtttgatccttacacaaagatagtgtatgactatatgggtgggatgcaagatatcaaaaaagctaaagtacggactgtaatccctgctaatatttcttttgtggaggattgcgctcgcattttgcgtggggttagaattgcagcacgtttagggtttcgtttcactaaagatatagctcattctgtaagagagttatcttgctcagtgttaagacttgataagggaaggatactcatggaaatgaattacatgctagcttatgggtccgcagaagcttccttgaggttattatggaaatttggactcctggagatacttctacccatacaagcagcatatcttgtttcccaaggttttcgaagacgtgatcagagatcaaacatgcttttgtctttgttttcaaacctggatagacttgtggcacctgatcggccatgccataatagcttatggattggtatgttagcatttcataaggccttggttgaccaacctcggcaccccatggttgttgcagcattcagccttgctgtgcacaatggtggatccttgtcggaagcggtggaaattgcaaggagaatctcccaacctcatgaccagagcttcagtgaattattagaacctcaggatctagactcggatgaatccttgatagacgagatcatggatcttgcagcatcggtgaaatctgcattgatgaagatgacagatgaacattttgtttcccaagcaatgagcaaatacccacgagcaccatactcagatctggtttttatctcattggcatcattcctaagagcatctaagatctttcagtgcgtacaagggggtgctgagaagggattcgtaccaaaacaagggagtaggattgactacgaattcttagcattgggaagccttcgtgaggttcggcatgtgtttgcaaggatcgtttttgacaccgtttaccctctaagcctcaacacagaggacaattttgtaaaccaaaattcttagtcaattaatattatggagcaaagcttgtctcaaatctcatattttttttataaatcaaatgttataatattaa

SEQ ID NO: 574 - protein, 537 aa, Vitis vinifera
MAIAVLGFSCRSYLTFRRPLVYCVHKVRHRSNVATVESPPEPVGVTKEEEPHWATSDGRGNGASKAPEWKKLNSKDLGIRTSMIAKPTRYVLNGLKKKGYEVYLVGGCVRDLILKRTPKDFDIITSAELKEVLRAFPRCEVVGKRFPICHVHVNDTIVEVSSFSTSGKRTGRKLDYILRRPPDCDDHDYIRWRNCLQRDFTINGLMFDPYTKIVYDYMGGMQDIKKAKVRTVIPANISFVEDCARILRGVRIAARLGFRFTKDIAHSVRELSCSVLRLDKGRILMEMNYMLAYGSAEASLRLLWKFGLLEILLPIQAAYLVSQGFRRRDQRSNMLLSLFSNLDRLVAPDRPCHNSLWIGMLAFHKALVDQPRHPMVVAAFSLAVHNGGSLSEAVEIARRISQPHDQSFSELLEPQDLDSDESLIDEIMDLAASVKSALMKMTDEHFVSQAMSKYPRAPYSDLVFISLASFLRASKIFQCVQGGAEKGFVPKQGSRIDYEFLALGSLREVRHVFARIVFDTVYPLSLNTEDNFVNQNS

SEQ ID NO: 575 - DNA, 785 bp, Zea mays
atggccctgcgctccccggatctgcggtggctcggatcgctcacgaggcccggccgccttgcaccatccccactcgccgcgctcgcctccccacggcgccgccgccgcgcaccgtccccttcgccctcgccctccgactcctccaccccatctaccgcccctacatccgacagtgggccgggagcggaggggatggaggggctggagtggaagaagatcagtgccaagaggttcgggatcaaggagtccatgatcccccccgaggcctgaaacgtactacaccgcctccgcagcagaggatatgatgtgtaccttgttggtggttgtgttcgagatctcataatgaaaaagacgccaaaggatttcgacataataacaacagctgatcttaggcaggtgaaagacactttcttaggatcagctgttatagtaggaaggcgttttcccatatgtcatgtacatgagaacaattccatcgttgaggtgtcaagttttaatacttgtgcaaggggatcaagtggtagccagatttacaattcaaagagccaaaattgtagcaagaatgattttgttcgctggaagaactgccaaaggagggacttcacaattaatgggttaatgtttaacccatattcagaaaagatctatgattacttgagaggcattgaagatattaagaaagctaaggtccgtactgtaattcctgctggcacttcgtttcaagaggactgtgcccgtattctacgtgcaatcagaattgcagctcgttttagggttcattttcc

SEQ ID NO: 576 - protein, 261 aa, Zea mays
MALRSPDLRWLGSLTRPGRLAPSPLAALASPRRRRRAPSPSPSPSDSSTPSTAPTSDSGPGAEGMEGLEWKKISAKRFGIKESMIPPEANVLHRLRSRGYDVYLVGGCVRDLIMKKTPKDFDIITTADLRQVKDTFLGSAVIVGRRFPICHVHENNSIVEVSSFNTCARGSSGSQIYNSKSQNCSKNDFVRWKNCQRRDFTINGLMFNPYSEKIYDYLRGIEDIKKAKVRTVIPAGTSFQEDCARILRAIRIAARFRVHFP

SEQ ID NO: 577 - DNA, 1416 bp, Zea mays
atggaggggctggagtggaagaagatcagtgccaagaggttcgggatcaaggagtccatgatcccccccgaggcctggaacgtactacaccgcctccgcagcagaggatatgatgtgtaccttgttggtggttgtgttcgagatctcataatgaaaaagacgccaaaggatttcgacataataacaacagctgatcttaggcaggtgaaagacactttcttaggatcagctgttatagtaggaaggcgttttcccatatgtcatgtacatgagaacaattccatcgttgaggtgtcaagttttaatacttgtgcaaggggatcaagtggtagccagatttacaattcaaagagccaaaattgtagcaagaatgattttgttcgctggaagaactgccaaaggagggacttcacaattaatgggttaatgtttaacccatattcagaaaagatctatgattacttgggaggcattgaagatattaagaaagctaaggtccgtactgtaattcctgctggcacttcgtttcaggaggactgtgcccgtattctacgtgcaatcagaattgcagctcgtttagggttcagcttccccaaagaaacagcttattatgtgagaacacttgcttgctcagtggcaagacttgataaggcaaggatactcatggagatgaactatatgcttgcttatggttcagctgaagcttctttgaggttgttgtggaggtttggcctccttgaacatttgttgccctttcaggcagcatatttctcttcgactcgttttaagaggaaggataaaggaactaatatgctacttgtcttattttctaagctggataattttcttgcaccgaacaggccatgtcacaatagtctatggataagccttttagcttttcatgaagcattggcacgcaaaccatgtgatcctttgatagtggctacttttgcactagccttttacctgggaggtgatatgtctttggcagtggatatcggaaaatcaatcaaccgacaacatgatactggctttcgggagctcttagaacccaaagtctggactgataagcatttggcaggtgaagtacaaagctttgctgcattgatgaagcagacattaactgaaatgactgatgagtatcatgtcgcaaatgctatggcaaaaatccctcaagcaccttcctcagatcttgtatttataccactacaagcctacctgaaggttctcaaatttatcgagtgtgttcaatatggcaaaaaggagcgtggccatgaaccaaaacgcgatgggatgatcaattaccataacctgtctaatggtacacatgcagaaataagaaacctctttacactggtggtttttgacacactgtaccctacagacacggaggatgaaaatgactgcagttcttag

SEQ ID NO: 578 - protein, 471 aa, Zea mays
MEGLEWKKISAKRFGIKESMIPPEAWNVLHRLRSRGYDVYLVGGCVRDLIMKKTPKDFDIITTADLRQVKDTFLGSAVIVGRRFPICHVHENNSIVEVSSFNTCARGSSGSQIYNSKSQNCSKNDFVRWKNCQRRDFTINGLMFNPYSEKIYDYLGGIEDIKKAKVRTVIPAGTSFQEDCARILRAIRIAARLGFSFPKETAYYVRTLACSVARLDKARILMEMNYMLAYGSAEASLRLLWRFGLLEHLLPFQAAYFSSTRFKRKDKGTNMLLVLFSKLDNFLAPNRPCHNSLWISLLAFHEALARKPCDPLIVATFALAFYLGGDMSLAVDIGKSINRQHDTGFRELLEPKVWTDKHLAGEVQSFAALMKQTLTEMTDEYHVANAMAKIPQAPSSDLVFIPLQAYLKVLKFIECVQYGKKERGHEPKRDGMINYHNLSNGTHAEIRNLFTLVVFDTLYPTDTEDENDCSS

SEQ ID NO: 579 - DNA, 2613 bp, Arabidopsis thaliana
atggcaatggaggttacgcagttgctcattaatgctcagtcgattgatggaactgtacgtaagcacgcggaagaaagtcttaagcagtttcaggagcaaaaccttgcgggtttcttgttgtcgcttgctggagagcttgcgaatgatgagaagccagtagatagcaggaaattagctggtttagtccttaaaaatgctcttgatgctaaggaacaacacaggaagtatgagcttgttcagagatggttggctctagacatgtcaacaaagtcgcagatcagagctttcttgttgaagacactgtcggcacctgtgcctgatgttcgttcgactgcatctcaggtcattgctaaggttgcaggtattgagttaccacagaagcagtggcctgagctcatagtgtctcttctctcaaatattcaccagttacctgctcatgtcaagcaagccactttggagactcttggatacctatgtgaagaagtgtcacctgatgttgttgaacaggagcatgtaaataagatactcacagctgttgttcagggtatgaatgctgctgaaggtaatactgatgttagacttgctgcaacccgtgctttatacatggctctcggattcgcccaagcaaatttcaacaacgacatggagcgtgattatatcatgagagttgtgtgtgaagcaaccctgtcccctgaggtgaaaattaggcaggcagcttttgagtgtttggtatctatcgcttccacatactatgagaagttggcgcattacatgcaagatatattcaacatcacagctaaggctgtaagagaagatgacgagtctgttgctctacaggcaattgagttctggagttctatttgtgacgaagagattgacatcttagaagaatatggtggtgagttcgctggggattctgatgttccatgcttttattttactaagcaggctctccctggtcttgtgcctctactgctggagactcttctgaagcaagaagaagatcaagatttggatgaaggggcttggaatattgcaatggcaggtgggacatgcctcggtttggttgctagggcagttggagatgacattgttccacatgtcatgccgtttattgaagagaaaatatcaaagcctgattggagagagcgagaagctgcaacttatgcttttggttccattttggaaggcccttctgccgataagttgatggcaattgttaacgcagcgttaacatttatgctcaatgctctaacaaatgacccaagcaaccatgtgaaagacacaaccgcatggacccttggtcggatatttgagttccttcatggttcaacaatcgagacacctattattaatcaggcaaactgccagcagataatcacagtactcatccagagcatgaatgatgcgcctaatgttgccgagaaggcttgtggggctctgtacttccttgctcaaggctatgaggatatcggtcccagttctccgttaacacccttcttccaggaaattattaagtcacttttagctgttgcacacagagaggatgcaactgaatcacgcttgcggactgcagcatatgaggcattgaatgaagttgtcaggtgttcaactgatgaaacgtctaccatggttctgcaattagtaccagtgataatgatggagcttcacaatactttggaaggggaaaagctttcattggatgagagggagaaacaaaacgagttgcagggacttctatgtggatgcttgcaggtcatcatacagaaattaggatctgaaccaaccaagtctaagttcatggagtatgcagaccaaatgatgggacttttcctgagggtgtttggttgtagaagtgcaactgcacatgaggaagccatgcttgccattggtgctcttgcttatgcagcaggtcccaattttgccaaatacatgcctgagttttataagtacttggagatgggtcttcaaaactttgaagaataccaagtgtgtgctgttactgttggtgttgttggggatgtctgcagagcattggaggacaagattttaccttattgcgatgggattatgacacagcttctgaaagatttgtcgagcaaccaattgcaccgatcagtgaagccaccgatattctcctgttttggtgacatagcacttgctatcggtgaggattttgataagtactggaggtattcaatgccgatgcttcagagtgccgcagagttatctgctcactcggctggagctgatgatgaaatgacggagtacacaaactcattgagaaacggaatccttgaggcttattcaggcatatttcaaggtttcaagaactccgccaaaacccagctcctgattcctttcgcaccccatatcctccagtttttggacagtatatacatggagaaagacatggacgaggtggtgatgaagacagcgattggggtcttaggagatttagcagatacactagggagtcatgtgggtggtttgatacaacagtcagtgtcaagtaaagagttcttaaacgaatgtttgtcttctgaagaccacacaattaaagaagcagccgaatgggcgaagcatgccataacccgtgccatatctgtttga

SEQ ID NO: 580 - protein, 870 aa, Arabidopsis thaliana; identical to SEQ ID NO: 50

SEQ ID NO: 581 - DNA, 2616 bp, Arabidopsis thaliana
atggctatggagatcacacagttccttctggctgcccagtcagccgatgcaagagtccgtactgaagcagaggctagtctcagacagttccaagaacaaaacttgccgctgttcttgttatccttgtcttttgagcttgaaaacaatgataaacctgctgaatcccgtcgactagccggtattctgctaaagaattctctggacgccaaagattctgccacaaaagatcatctggtgaaacaatggtttgcaattgatgttgctcttaaatcccagatcaaggatcgcttactaagaactcttggttcatctgccctagaggcaaggcatacttcagctcaggttattgctaaggtagcctccattgaaattcctcagaagcagtggcctgaacttgttggatcgctgcttaacaatatgactcagcaaggcagtcccgcacacttgaagcaatcaaccttggaaactctaggctatgtctgtgaagagatatcacaccatgatcttgtgcaagatgaagtgaattctgtcctcacagcagttgtgcagggcatgaaccagtctgaaaatactgctgaagttcgtctcgcagcaacaaaggcactgttaaatgccttggatttctctcagacaaattttgagaatgaaatggagaggaattacatcatgaagatggtatgcgagacagcatgttccaaggaggcagagatcaggcaagctgctttcgagtgccttgtgtccattgcatccacatactatgaggtgctggagcactacatacaaacactctttgagctcacatcgaatgctgtaaagggagatgaagagagcgttgccctccaagcaattgagttctggagttccatctgtgatgaagagatcgaccgtcaagagtatgacagtcctgatagtggtgactcatcccctccccactcctgtttcatagagaaggctcttccccatttagttcaaatgttgctagaaactctgctgaagcaggaagaggatcaggaccatgacgacgatgtctggaacatatctatggctggcgggacatgccttggcctggttgctagaacggttggagatggtgtagtccctcttgtgatgccttttgttgaaaaaaacataagttcgccagattggcgaagccgggaggcagccacttatgcttttggatcaattttggagggcccaacaattgataagcttgccccgatggtagctgctggcttggaatttctccttaatgcaaccaaggatcagaataaccatgtcagggatacaactgcttggactctgagccgtatctttgaatttttgccatccccagacagtggcttctctgttatatcacccgaaaacctccctagaattgtgagtgtattactggaatcaattaaagatgtgccaaatgttgcagagaaggtctgtggagcaatatacaatcttgcacagggatatgaagactctggagcaagttcctctcttctctctccttatcttacagagatcatcacacatctccttgcagctgctgagcgtacagatggggcagagtctaagctaagaggtgctgcgtatgaaaccttgaacgaggttgtccggtgttcaaacctttcagaggcctcaagcatcatagcgcatctcctccctgccatcatgaaaaaattagctgagacaatggacctccctataatatcaactgatgaccgtgagaagcaagcggaactccaggcgtctctgtgcggtgttctccaagtcataatccagaagctgagcagcagggacgatatgaaacctatcatagtgcaaaacgcagatgacatcatgaggttattcctaagagtgtttggttgccatagttcaagtgtccacgaagaagccatgcttgcaatcggtgctcttgcctatgcgactggaactgagtttgtgaaatacatgcccgagctttttaaatatctccagatggggctgcagaatttcgaagaataccaagtctgctcaatcaccgtaggagtgattggtgacatatgccgtgcgctggatgaaaaaatcctacccttttgcgatcagataatgggtctccttatccaaaaccttcaaagtggtgcactccacagatcggtgaagcctccaatcttctcatgctttggagacattgctctggcgattggtgctcattttgaaaggtatgtagctccagctgttcagataatgcaaggtgctgctcaggtgtgtgcgcagatggacacccttgacgaggagcttatggattatgcaaaccaactccggagaagcatctttgaagcatactccgggatactgcaagggttcaaggatgcaaaggctgagctcatgatgccctatgctcaacatctgttgcagtttgttgaactagtatccaaagattccctgagggatgagagcgtgacaaaagccgcggttgcagcaatgggtgatcttgcggatgttgtaggggagaacacgaagcagttgttccaaaacttcaccttctgtgatgagttcctcaatgagtgtctcgaatcagaggatgaagatctcaaggtcactgcacgctggactcaaggaatgatcgcaagactcgtgctctaa

SEQ ID NO: 582 - protein, 871 aa, Arabidopsis thaliana
MAMEITQFLLAAQSADARVRTEAEASLRQFQEQNLPLFLLSLSFELENNDKPAESRRLAGILLKNSLDAKDSATKDHLVKQWFAIDVALKSQIKDRLLRTLGSSALEARHTSAQVIAKVASIEIPQKQWPELVGSLLNNMTQQGSPAHLKQSTLETLGYVCEEISHHDLVQDEVNSVLTAVVQGMNQSENTAEVRLAATKALLNALDFSQTNFENEMERNYIMKMVCETACSKEAEIRQAAFECLVSIASTYYEVLEHYIQTLFELTSNAVKGDEESVALQAIEFWSSICDEEIDRQEYDSPDSGDSSPPHSCFIEKALPHLVQMLLETLLKQEEDQDHDDDVWNISMAGGTCLGLVARTVGDGVVPLVMPFVEKNISSPDWRSREAATYAFGSILEGPTIDKLAPMVAAGLEFLLNATKDQNNHVRDTTAWTLSRIFEFLPSPDSGFSVISPENLPRIVSVLLESIKDVPNVAEKVCGAIYNLAQGYEDSGASSSLLSPYLTEIITHLLAAAERTDGAESKLRGAAYETLNEVVRCSNLSEASSIIAHLLPAIMKKLAETMDLPIISTDDREKQAELQASLCGVLQVIIQKLSSRDDMKPIIVQNADDIMRLFLRVFGCHSSSVHEEAMLAIGALAYATGTEFVKYMPELFKYLQMGLQNFEEYQVCSITVGVIGDICRALDEKILPFCDQIMGLLIQNLQSGALHRSVKPPIFSCFGDIALAIGAHFERYVAPAVQIMQGAAQVCAQMDTLDEELMDYANQLRRSIFEAYSGILQGFKDAKAELMMPYAQHLLQFVELVSKDSLRDESVTKAAVAAMGDLADVVGENTKQLFQNFTFCDEFLNECLESEDEDLKVTARWTQGMIARLVL

SEQ ID NO: 583 - DNA, 2622 bp, Arabidopsis thaliana
atggcgatggagatcacacagtttctgttggctgcccagtcagccgatgcaagagtccggactgaagcagagggtaatctcaggcaattccaagaacagaacttgccgctgttcttagtatccttgtcttttgagcttgccaacaatgataaacctgctgaatcccgtcgactagccggtattctgctaaagaattctctggacgccaaagattctgccacaaaagatcatctggtgaaacaatggtttgcaattgatgttgctcttaaatcccagatcaaggatcgcttactaagaactcttggttcatctgccctagaggcaaggcatacttcagctcaggttattgctaaggtagcctccattgaaattcctcagaagcagtggcctgaacttgttggatcgctgcttaacaatatgactcagcaaggcagtcccgcacacttgaagcaatcaaccttggaaactctaggctatgtctgtgaagagatatcacaccatgatcttgtgcaagatgaagtgaattctgtcctcacagcagttgtgcagggcatgaaccagtctgaaaatactgctgaagttcgtctcgcagcaacaaaggcactgtgtaatgccttggatttctctcagacaaattttgagaatgaaatggagaggaattacatcatgaagatggtatgcgagacagcatgttccaaggaggcagagatcaggcaagctgctttcgagtgccttgtgtccattgcatccacatactatgaggtgctggagcactacatacaaacactctttgagctcacatcgaatgctgtaaagggagatgaagagagcgtttccctccaagcaattgagttctggagttccatctgtgatgaagagatcgaccgtcaagagtatgacagtcctgctagtggtgactcatctcctccccactcctctttcatagagaaggctcttccccatttagttcaaatgttgctagaaactctgctgaagcaggaagaggatcaggaccatgatgacgacgtctggaacatatctatggctggcgggacatgccttggcctggttgccagaacagttggagatcatgtagtccctcttgtgatgccttttgttgaaaaaaacataagttcgccagattggcgctgccgggaggcagccacttatgcttttggatcaattttggagggcccaacaattgataagcttgccccgatggttgctgctggcttggaatttctccttaatgcaaccaaggatcagaataaccatgtcagggatacaactgcttggactctgagccgtatctttgaatttttgcactccccagacagtggtttctctgttatatcacccgaaaacctccctagaattgtgagtgtattactggaatcaattaaagatgtgccaaatgttgcagagaaggtctgtggagcaatatacaatcttgcacagggatatgaagactctggagcaagttcatctcttctctctccttatcttacagagatcatcacacatctgcttgcagctgctgagcgtacagatggggcagagtctaagctaagaggtgctgcgtatgaaaccttgaacgaggttgtccggtgttcaaacctttcagaggcctcaagcatcatagcgcatctcctccctgccatcatgaaaaaattagctgagacaatggacctccctataatatcaactgatgaccgtgagaagcaagcggaagtccaggcttctctgtgtggtgttctccaagttataatccagaagctgagcggcagggaggatacgaaacccatcataatgcagagcgcagatgacattatgaggctgttcctaagagtgtttggatgccatagttcaagtgtccacgaagaagccatgcttgcaatcggtgctcttgcatatgctactggagctgagtttgtgaaatacatgcccgagcttttcaaatatctccagatggggctgcagaatttcgaagaataccaagtctgctcaatcacagtaggagtgcttggtgacatttgccgtgccctggatgaaaaaatcctacctttttgcgatcagataatgggtctccttatccaaaaccttcaaagtggggcactccacagatcagtgaagcctccaatattctcatgctttggagacattgctctggcaattggtgctcattttgaaaggtatgtagcaccagccgttcagatcatgcaaggggctgctcaggtgtgtgctcagatggatacccttgacgaggagcttatggattatgcaaaccaactgcggagaagcatctttgaggcatactccgggatactacaagggttcaaggacacaaaagccgagctcatgatgccctacgctcaacatctcctgcagtttgttgaactagtatccaaagatcccctgagggatgagagcgtgacaaaagccgcggttgcagcgatgggtgatcttgcggatgttgtaggagagaacacaaagcagttgttccaaaacttcaccttcttcggtgagttccttaatgagtgtctcgaatcagaggatgaagatctcaaggtcactgcacgctggactcaaggaatgattgcaaggctcatgcacccatcataa

SEQ ID NO: 584 - protein, 873 aa, Arabidopsis thaliana
MAMEITQFLLAAQSADARVRTEAEGNLRQFQEQNLPLFLVSLSFELANNDKPAESRRLAGILLKNSLDAKDSATKDHLVKQWFAIDVALKSQIKDRLLRTLGSSALEARHTSAQVIAKVASIEIPQKQWPELVGSLLNNMTQQGSPAHLKQSTLETLGYVCEEISHHDLVQDEVNSVLTAVVQGMNQSENTAEVRLAATKALCNALDFSQTNFENEMERNYIMKMVCETACSKEAEIRQAAFECLVSIASTYYEVLEHYIQTLFELTSNAVKGDEESVSLQAIEFWSSICDEEIDRQEYDSPASGDSSPPHSSFIEKALPHLVQMLLETLLKQEEDQDHDDDVWNISMAGGTCLGLVARTVGDHVVPLVMPFVEKNISSPDWRCREAATYAFGSILEGPTIDKLAPMVAAGLEFLLNATKDQNNHVRDTTAWTLSRIFEFLHSPDSGFSVISPENLPRIVSVLLESIKDVPNVAEKVCGAIYNLAQGYEDSGASSSLLSPYLTEIITHLLAAAERTDGAESKLRGAAYETLNEVVRCSNLSEASSIIAHLLPAIMKKLAETMDLPIISTDDREKQAEVQASLCGVLQVIIQKLSGREDTKPIIMQSADDIMRLFLRVFGCHSSSVHEEAMLAIGALAYATGAEFVKYMPELFKYLQMGLQNFEEYQVCSITVGVLGDICRALDEKILPFCDQIMGLLIQNLQSGALHRSVKPPIFSCFGDIALAIGAHFERYVAPAVQIMQGAAQVCAQMDTLDEELMDYANQLRRSIFEAYSGILQGFKDTKAELMMPYAQHLLQFVELVSKDPLRDESVTKAAVAAMGDLADVVGENTKQLFQNFTFFGEFLNECLESEDEDLKVTARWTQGMIARLMHPS

SEQ ID NO: 585 - DNA, 2289 bp, Glycine max
atggcaatggaagttacccaggtgcttttgagtgctcaatcaattgacgggaatgtacggaagcatgctgaggacagtctccgacaatttcaggagcaaaaccttcctggattcttggtctctctctctggagagttagcaagtgaagataaaccggttgatagccgaaagttggcgggtttgatactgaaaaatgctttggatgccaaggatgaaaacagaaagcaggaattggtccaaagatggttgtcgctggaccctgtggcaaagactcaagttaagtcatgcttgctgcaaacactctcttctcttgtacctgatgctcggtctacagcaactcaagttattgctaaagttgctggaattgagcttcctcagaaacagtggcctgagctgataggatcacttttatcaaatattcatcaagttcctactcatgtcaagcaagcgactttggagaccctggggtatttgtgtgaggaggtatctcctcaggttgttgatcaagaccaagtaaataaaatacttactgccgtagttcaaggtatgaatgcgtctgaagggaacaatgatgttaggcttgctgctacaagggcattatataacgctcttgggtttgctcaagctaattttagcaatgatatggagcgtgattatatcatgagagttgtttgtgagacaactgtgtgccctgaactgaaaatacgtcaagcagcctttgaatgtttggtctcaattgcagccatgtattatgagaaattggctccttacatccaggatatatataacatcacagcaaaggctgttagggttgatgaggaacctgttgctcttcaagccattgaattttggagtacaatttgtgatgaggagactgatatcttagaagaatatatgggtgattccaatggagactccgatataccttgtttttatttcatcaagcaagctcttcctgcacttatccctctgctgttggaaacattactcaaacaagaagaggatcaggatctggacgaaggtgcatggaatattgcaatggcaggtggtacatgccttggtttagttgcccgtactgttggagatgatattgtgccgctggtaatgcccttcattgaggagaatatcacaaaaccagattggaggcaaagggaggcagcctcttatgcttttggatctatcttggaggggccttcacctgacaaattagctcctcttgttaaccatgccttaccatttatgcttagtgctttagtgaaggacccaaacaaccatgtgaaagacaccactgcttggactttgggacgaatgttcgaatttcttcacagttcaattgttggtacaccaatcattaatgagggaaattgccaacagattattacagttctccttcaaagcatgaaggatgttcccaatgttgctgagaaggcctgtggtgctctgtattttcttgcccagggttatgaggatgttggaccaacatctccgctaactcccttgtttcaggaaattgttcaatcccttctaactgttacccacagagaggatgctacagaatctcgattgagaactgcggcatatgaaacattgaatgaagtagtaaggtgttcaacagatgaaacagctactttggtggtacaactagtttctgtcatcatgatggagctgcacaaatgtcttgaagcacaaaatctttcatcggatgagagagaaaagcggagtgaattgataggccttctttgtgggtgcatgcaagtaattattcagaaactagggtctttggattctaccaaatatgtgttggtgcagtattctgatcagataatgagactattcttcagggtctttgcttgtagaaatgccactgcacacgaggaggcaatgctagccattggagcccttgcctactcaataggccaggagttttccaattacatgccagaattttacaagtttctcgagatggaccttcagaactttgaggagtaccaagtttgtgctgtcactgttggtgtcataggggacatatgcagggcattggagttaaaaatactgccttattgtgatgggattatgacacaactcctcaagaatttgtcaagtgataatttgcaccgttctgtgaagccccctttattctcatgcattggtgatattgcacttgcaataggagataacttcaataaatacttaatgtatgcaatgaacacactacaacttgctgcagagatgtatgcccacacgtcaggttttgatgatgaaatgacaggagtatatcaaattctttga

SEQ ID NO: 586 - protein, 762 aa, Glycine max
MAMEVTQVLLSAQSIDGNVRKHAEDSLRQFQEQNLPGFLVSLSGELASEDKPVDSRKLAGLILKNALDAKDENRKQELVQRWLSLDPVAKTQVKSCLLQTLSSLVPDARSTATQVIAKVAGIELPQKQWPELIGSLLSNIHQVPTHVKQATLETLGYLCEEVSPQVVDQDQVNKILTAVVQGMNASEGNNDVRLAATRALYNALGFAQANFSNDMERDYIMRVVCETTVCPELKIRQAAFECLVSIAAMYYEKLAPYIQDIYNITAKAVRVDEEPVALQAIEFWSTICDEETDILEEYMGDSNGDSDIPCFYFIKQALPALIPLLLETLLKQEEDQDLDEGAWNIAMAGGTCLGLVARTVGDDIVPLVMPFIEENITKPDWRQREAASYAFGSILEGPSPDKLAPLVNHALPFMLSALVKDPNNHVKDTTAWTLGRMFEFLHSSIVGTPIINEGNCQQIITVLLQSMKDVPNVAEKACGALYFLAQGYEDVGPTSPLTPLFQEIVQSLLTVTHREDATESRLRTAAYETLNEVVRCSTDETATLVVQLVSVIMMELHKCLEAQNLSSDEREKRSELIGLLCGCMQVIIQKLGSLDSTKYVLVQYSDQIMRLFFRVFACRNATAHEEAMLAIGALAYSIGQEFSNYMPEFYKFLEMDLQNFEEYQVCAVTVGVIGDICRALELKILPYCDGIMTQLLKNLSSDNLHRSVKPPLFSCIGDIALAIGDNFNKYLMYAMNTLQLAAEMYAHTSGFDDEMTGVYQIL

SEQ ID NO: 587 - DNA, 2613 bp, Glycine max
atggccatggaggttactcaaatccttttaaacgcgcaagcagtcgatggcacattaaggaaacaagccgaggaaagcttgaaacaatttcaggaacagaatcttccaagtttcttgttttctcttgctggggaactggcaaatgacgacaagcctgcagagagtcgcaagctagcaggtttaattctgaagaatgctctggatgctaaagagcagcacagaaaaatagaatttgttcaaagatggttgtcattggacccaactttgaaatcccagattaaggcattcttgttaaggacactttcttctccttctcttgatgcccggtcaactgcatcacaggttattgctaaagttgctggcattgagttgcctcataaacagtggcctgaattgataggatccctcttgtctaatgctcatcagcttcctgcccctacaagacaggcaacacttgagacccttggttacatctgtgaagaagtttcccctgatgtagtagaccaggatcatgtaaataagatactcactgctgttgttcaagggatgaattcaacagaagaaaacaatgatgtcaggcttgctgccataaaagcattgtacaatgcattgggttttgctcaggcgaatttttctaatgacatggagcgggattatatcatgagaattgtgtgtgagacaacacaatctcctgaattgaagattcgacgagcagcttttgagtgcttggtagctatttcttcgacatactatgaaaagttagctccttatatccaagatatcttcaacatcactgccaaggctgtgagggaagatgaggagccggttgcacttcaggcaattgagttttggagttcaatatgtgacgaagaaattgatatactagaagaatatggtggtgattttagtggggattcagaggttccctgcttttattttattaaacaggcactttcatttcttgtccccatgttattggagacactgctgaagcaagaagaagatcaagaccaggatgaaggagcatggaacattgctatggctggaggtacctgcttgggattagttgcacggacagttggtgatgacattgtacctttggttatgccgtttattgaagagaatataaccaaaccagattggaggcaaagggaagctgcaacttatgcctttggctctattttagaaggtccctcccctgataaacttgtgccactggtgaatatggctttgaatttcatgctcactgcattgatgaaagatccaaataatcacgtgaaggacacaactgcatggactctagggcgaatgttcgaatttttgcatggatcagctctggatactccgattattactccagcaaactgccaacagattattactgtgctgcttcagagcatgaaggatgttccaaatgttgctgagaaggcttgtggtgctctttattttcttgcccaaggctatgaggatgctgcatctgcgtcctctccattgacccccttctttcaagatattgttcatgctcttctcactgtaactcacagagaggatgctggagaatcccgccttagaacagcagcctatgaagccttaaatgaagtagtgaggtgttctaatgatgaaacagctcctatggtggtacaacttgttcctctcatcatgatggagctccatcagactcttgagaatcagaaggtttcatctgacgagaggcagaatgagttacaaggccttctatgtggttgcttgcaggttatcatacagaagttaggatcatctgaaccaacaaagtatcatttcatgcagtatgctgaccaaataatgggtttatttttgagagtgtttgcttctcgaagtgcaacagctcatgaggaggctatgcttgccattggagctttggcctatgcaactggtgctgattttgcgaaatacatgacagaattttacaagtacttggagatgggtctccaaaattttgaggactaccaggtatgtgctatcacagtgggtgtggttggtgatgtatgcagagccttggaggagaaagtactgccttattgtgatgggataatgacccaacttcttaaggatttgtccagcaatcagctgcataggtctgttaagcctcctattttttcatgttttggagacatagccttggcaattggagaaaactttgagaagtacttgttatatgcaatgcctatgcttcagagtgctgcagaactctctgctcatacatctggtgctgatgatgatatgacagaatacacaaattctttgagaaatggaattctagaggcatactcagggatcttccaaggatttaaaggttccccaaagacccagcttctgatgtcttatgctcctcatgtgctgcaattcttggatagtttgtatatggagaaggacatggatgatgttgtgactaagacagcaattggcgtgcttggagatttagctgatactttgggcagtagtgctggccccttgattcagcaatctgtgtctagcaaagacttcctcaaagagtgtttatcatctgatgaccatttgattaaggaatctgccgaatgggccaagttggcaatcagtcgagcaatttcattttga

SEQ ID NO: 588 - protein, 870 aa, Glycine max
MAMEVTQILLNAQAVDGTLRKQAEESLKQFQEQNLPSFLFSLAGELANDDKPAESRKLAGLILKNALDAKEQHRKIEFVQRWLSLDPTLKSQIKAFLLRTLSSPSLDARSTASQVIAKVAGIELPHKQWPELIGSLLSNAHQLPAPTRQATLETLGYICEEVSPDVVDQDHVNKILTAVVQGMNSTEENNDVRLAAIKALYNALGFAQANFSNDMERDYIMRIVCETTQSPELKIRRAAFECLVAISSTYYEKLAPYIQDIFNITAKAVREDEEPVALQAIEFWSSICDEEIDILEEYGGDFSGDSEVPCFYFIKQALSFLVPMLLETLLKQEEDQDQDEGAWNIAMAGGTCLGLVARTVGDDIVPLVMPFIEENITKPDWRQREAATYAFGSILEGPSPDKLVPLVNMALNFMLTALMKDPNNHVKDTTAWTLGRMFEFLHGSALDTPIITPANCQQIITVLLQSMKDVPNVAEKACGALYFLAQGYEDAASASSPLTPFFQDIVHALLTVTHREDAGESRLRTAAYEALNEVVRCSNDETAPMVVQLVPLIMMELHQTLENQKVSSDERQNELQGLLCGCLQVIIQKLGSSEPTKYHFMQYADQIMGLFLRVFASRSATAHEEAMLAIGALAYATGADFAKYMTEFYKYLEMGLQNFEDYQVCAITVGVVGDVCRALEEKVLPYCDGIMTQLLKDLSSNQLHRSVKPPIFSCFGDIALAIGENFEKYLLYAMPMLQSAAELSAHTSGADDDMTEYTNSLRNGILEAYSGIFQGFKGSPKTQLLMSYAPHVLQFLDSLYMEKDMDDVVTKTAIGVLGDLADTLGSSAGPLIQQSVSSKDFLKECLSSDDHLIKESAEWAKLAISRAISF

SEQ ID NO: 589 - DNA, 2616 bp, Glycine max
atggcaatggaagttacccaggtgcttttgagtgctcaatcaattgacggaaatgtacggaagcatgctgaggacagtctacgacaatttcaggagcaaaaccttcctggattcttggtctctctatctggagagttagcaagtgaagataaaccggttgatagccgaaagttggcgggtttgatactgaaaaatgctttggatgccaaggatgaaagcagaaagcaggaattggtccaaagatggttgtcgctggaccctgtggcaaagacccaagttaagtcatgcttgctacaaacactctcttctcttgtacctgatgctcggtctacagcaacccaagttattgctaaagtcgctggaattgagcttcctcagaaacagtggcctgagctgataggatcacttttatcaaatattcatcaagtaccttctcatgtcaaacaagcgactttggagaccctggggtatttgtgtgaggaggtatctcctcaggttgttgatcaggaccaagtaaataaaatacttactgccgttgttcaaggtatgaacgcgtctgaagggaacaatgatgttaggcttgctgctacaagggcattatataacgctcttgggtttgctcaggctaattttggcaatgatatggagcgtgattatatcatgagagttgtttgtgagacaactgtgtgccctgaagtgaaaatacgtcaagcagcctttgaatgtttggtctcaattgcagccatgtattatgaaaaattggctccttacatccaggatatatataacatcacagaaaaggctgttaggggtgatgaggagcctgttgctcttcaagccattgaattttggagtacaatttgtgatgaggagactgatatcttggaagaatatatgggtgattccaatggagactccgatataccttgtttttattttattaagcaagctcttcctgcacttatccctctgctgttggaaacattactcaaacaagaagaggatcaggatctggacgaaggtgcatggaatattgcaatggcaggtggtacatgccttggtttagttgctcgtactgttggagatgatattgtgccactggtaatgcccttcattgaggagaatattacaaaaccagattggaggcaaagggaggcagcctcatatgcttttggatctatcttggaggggccttcacctgacaaattagctcctcttgttaaccatgccttaccatttatgcttagtgccttagtgaaggacccaaacaaccatgtgaaagacaccactgcttggactttgggacgaatgttcgaatttcttcacagttcagttgttggtacatcaattattaatgagggaaattgccaacagattattactgttctccttcaaagcatgaaggatgttcccaatgttgctgagaaggcctgtggtgctctgtattttcttgcccagggttatgaggatgttggaccaacatctcctctaactcccttttttcaggaaattgttcaatcccttctaactgttacccacagagaggatgctacagaatcacgattgagaactgcagcatatgaaacattgaatgaagtagtaaggtgttcaacagatgaaacagcttctttggtggtacaactagtttctgtcatcatgatggagctgcacaaatgtcttgaagtacaaaatctttcatctgatgagagagaaaagcagagtgaattgataggccttctttgtggatgcatgcaagtaattattcagaagctagggtctttagattctaccaaatatctgttgttgcagtattctgatcagataatgggacaattcttcagggtctttgcttgtagaaatgccactgcacatgaagaggcgatgctagccatcggagcccttgcctactcgattggccatgagtttgccaagtacatgccagaattttacaagtttctcgagatggaccttcagaactttgaggagtaccaagtttgtgctgtcactgttggtgtggtaggggacatatgcagggcattggaggaaaaaatactgccttattgtgatgggattatgacacaacttctcaagaatttgtcaagtgataatttgcaccgttctgtgaagcccccattattctcatgcattggtgatatagcacttgcaataggagataactttaataaatacttaatgtatgcaatgaacacactacaacttgctgcagagatgtatgcccacacatcaggttttgatgatgaaatgacagagtacattaattccttgagaaatgggatattagaggcatattctgcgatttttcaagggtttaagaattcatcaaagacccagctcttgattccttatgcacctcatatcctccagtttttggatagcatatacgtggaaaaagacatggacgaggtagttatgaaaacagcaattggagtccttggagatctagctgatacacttggaagcaatgctggttctttaatacagcagtctttgtcaagcagagactttttgaatgaatgtttgacctctgaagatcatttgattaaggaatctgctgagtgggccaggttggctatcaatcgtgctatatctgtttga

SEQ ID NO: 590 - protein, 871 aa, Glycine max
MAMEVTQVLLSAQSIDGNVRKHAEDSLRQFQEQNLPGFLVSLSGELASEDKPVDSRKLAGLILKNALDAKDESRKQELVQRWLSLDPVAKTQVKSCLLQTLSSLVPDARSTATQVIAKVAGIELPQKQWPELIGSLLSNIHQVPSHVKQATLETLGYLCEEVSPQVVDQDQVNKILTAVVQGMNASEGNNDVRLAATRALYNALGFAQANFGNDMERDYIMRVVCETTVCPEVKIRQAAFECLVSIAAMYYEKLAPYIQDIYNITEKAVRGDEEPVALQAIEFWSTICDEETDILEEYMGDSNGDSDIPCFYFIKQALPALIPLLLETLLKQEEDQDLDEGAWNIAMAGGTCLGLVARTVGDDIVPLVMPFIEENITKPDWRQREAASYAFGSILEGPSPDKLAPLVNHALPFMLSALVKDPNNHVKDTTAWTLGRMFEFLHSSVVGTSIINEGNCQQIITVLLQSMKDVPNVAEKACGALYFLAQGYEDVGPTSPLTPFFQEIVQSLLTVTHREDATESRLRTAAYETLNEVVRCSTDETASLVVQLVSVIMMELHKCLEVQNLSSDEREKQSELIGLLCGCMQVIIQKLGSLDSTKYLLLQYSDQIMGQFFRVFACRNATAHEEAMLAIGALAYSIGHEFAKYMPEFYKFLEMDLQNFEEYQVCAVTVGVVGDICRALEEKILPYCDGIMTQLLKNLSSDNLHRSVKPPLFSCIGDIALAIGDNFNKYLMYAMNTLQLAAEMYAHTSGFDDEMTEYINSLRNGILEAYSAIFQGFKNSSKTQLLIPYAPHILQFLDSIYVEKDMDEVVMKTAIGVLGDLADTLGSNAGSLIQQSLSSRDFLNECLTSEDHLIKESAEWARLAINRAISV

SEQ ID NO: 591 - DNA, 2613 bp, Glycine max
atggccatggaggttactcaaatccttttaaatgcccaagcagtggatggaacattaaggaaacaagccgaggaaagcctgaaacaatttcaggaacagaatcttccaagtttcttattttctcttgctggggaactggcaaatgacgagaagcctgcagagagtcggaagctagcaggtttaattctcaagaatgctctggatgctaaagagcagcacagaaaaatagaatttgtccaaagatggctgtcattggacccaaccttgaaagctcagattaaggcattcttgttgaggacactttcttccccttctcttgatgcccgatcaactgcatcacaggttattgctaaagttgctggcattgagttgcctcataaacagtggcctgaattgataggatccctgttgtctaatgctcatcagcttcctgcccctacaagacaggcaacacttgagacccttggatacatctgcgaagaagtttccccagatgtagtagaccaggatcatgtaaataagatactcactgctgttgttcaagggatgaattcaacagaagaaaacaacgatgtcaggcttgctgccataaaagcattgtacaatgcattgggttttgcccaggcaaatttttcgaatgacatggagcgggattatatcatgagaattgtgtgtgagacaacacaatctcctgaactgaagattcgacgagcagcatttgagtgcttggtagctatttcttcgacatactatgaaaagttagctccttatatccaagatatcttcaacatcactgccaaggctgtgagggaagatgaggagccagttgcacttcaggcaattgagttttggagttcaatatgtgacgaagaaattgatatactagaagaatatggaggtgatttcagtggggattcagaggttccctgcttttattttattaaacaggcactttcatttcttgtccccatgttattggagacactgctgaagcaagaagaagatcaagaccaggatgaaggagcatggaacattgctatggctggaggtacctgcttgggattagttgcacggacagttggtgatgacattgtacctttggttatgccgtttattgaagagaatataaccaaaccagattggaggcaaagggaagctgcaacttatgcctttggctctattttagaaggtccatctcctgataaacttgtgccattggtgaatatggctttgaatttcatgctcactgcattgatgaaagatccgaataatcatgtgaaggacacaactgcatggactcttgggcgaatgttcgaatttttgcatggatcagctctggatactcccattatcactccagcaaactgccaacagattattactgtgctgcttcagagcatgaaagatgttccaaatgttgctgagaaggcttgtggtgctctttattttcttgcccaaggctatgaggatgctggatctgcatcctctccgttgacccccttcttccaagaaattgttcatgctctcctcactgtaactcacagagaggatgctggagaatcccgccttagaacagcagcctatgaagcgttaaatgaagtagtgaggtgttctaatgatgaaacagctcctatggtggtacaacttgttcctctcatcatgatggaactccatcagactcttgagaatcagaaggtttcatccgacgagaggcagaatgagttacaaggccttctatgtggttgcttgcaggttatcatacagaagttaggatcatctgaaccaacaaaatatcatttcatgcagtatgctgaccaaattatgggtttgtttttgagagtgtttgcttctcgaagtgcaacagctcatgaggaggctatgcttgccattggggctttggcctatgcaaccggtgctgattttgcgaaatacatgacagaattttacaagtatttggagatgggtctccaaaatttcgaggactaccaggtttgtgctatcacagtgggtgtggttggtgatgtatgcagagccttggaggagaaaatactgccttattgtgatgggataatgacccaacttcttaaggatttgtctagcaatcagttgcataggtccgttaagcctcctattttttcatgttttggagacattgccttggcaattggagaaaactttgagaaatacctgttatatgcaatgcctatgcttcagagtgccgcagagctctctgctcatacatctggtgctgatgacgatatgacagaatacactaattctttgagaaatggaattctagaggcatactcagggatcttccaagggtttaaaggttccccaaagacccagcttctgatgccatatgctcctcatgtgctgcaattcttggatagtttgtataatgagaaggacatggatgatgttgtgactaagacagcaattggcgtgcttggagatttagctgatactttgggtagtaacgctggcccgttgattcagcaatctgtgtccagcaaagacttccttaaagagtgtttatcatctgatgatcatttgattaaggaatctgcggaatgggccaagttggcaatcagtcgagcaatttctttttga

SEQ ID NO: 592 - protein, 870 aa, Glycine max
MAMEVTQILLNAQAVDGTLRKQAEESLKQFQEQNLPSFLFSLAGELANDEKPAESRKLAGLILKNALDAKEQHRKIEFVQRWLSLDPTLKAQIKAFLLRTLSSPSLDARSTASQVIAKVAGIELPHKQWPELIGSLLSNAHQLPAPTRQATLETLGYICEEVSPDVVDQDHVNKILTAVVQGMNSTEENNDVRLAAIKALYNALGFAQANFSNDMERDYIMRIVCETTQSPELKIRRAAFECLVAISSTYYEKLAPYIQDIFNITAKAVREDEEPVALQAIEFWSSICDEEIDILEEYGGDFSGDSEVPCFYFIKQALSFLVPMLLETLLKQEEDQDQDEGAWNIAMAGGTCLGLVARTVGDDIVPLVMPFIEENITKPDWRQREAATYAFGSILEGPSPDKLVPLVNMALNFMLTALMKDPNNHVKDTTAWTLGRMFEFLHGSALDTPIITPANCQQIITVLLQSMKDVPNVAEKACGALYFLAQGYEDAGSASSPLTPFFQEIVHALLTVTHREDAGESRLRTAAYEALNEVVRCSNDETAPMVVQLVPLIMMELHQTLENQKVSSDERQNELQGLLCGCLQVIIQKLGSSEPTKYHFMQYADQIMGLFLRVFASRSATAHEEAMLAIGALAYATGADFAKYMTEFYKYLEMGLQNFEDYQVCAITVGVVGDVCRALEEKILPYCDGIMTQLLKDLSSNQLHRSVKPPIFSCFGDIALAIGENFEKYLLYAMPMLQSAAELSAHTSGADDDMTEYTNSLRNGILEAYSGIFQGFKGSPKTQLLMPYAPHVLQFLDSLYNEKDMDDVVTKTAIGVLGDLADTLGSNAGPLIQQSVSSKDFLKECLSSDDHLIKESAEWAKLAISRAISF

SEQ ID NO: 593 - DNA, 915 bp, Hordeum vulgare
atgagagggagaagcggaccgatctgcagggccttctcttgtggttgcctacaggtcattatccagaaagtgggagggatggagtcaacaaagtttgccttcttacagtatgcagatcagatgatggatctgtttttgagagtttttgcttgccgaaatgccacggtgcatgaggaggctatgcttgctatcggtgcactggcatatgcagccggttcgaactttgcgaagtacatggcacaattctatcagtatttggaaatgggacttcagaactttgaagagtatcaggtatgtgccattacggtgggtgttgtgggcgacttgtgcagggcactggaggacaaaattttgccctactgtgatggcatcatgacccagctcctgaaggatctatccagcaatcagttgcacagatctgtaaaaccacctatattctcatgcttcggtgatattgcactggcaattggagagaacttcgagaagtatttgatctatgccatgcccatgctacaaagtgcagcagatttgtcggcgcacacaactgcaactgatgatgaaatgcttgactacaccaatcaattaagaaatggcatcttggaggcctactctggtattcttcaaggattcaagagttcccctaagacacagttactcatgccgtatgctccacatattcttcagttccttgatgcccttcataatggaaaggatatggatgattctgtgatgaagactgcaataggtgtcttaggagatcttgcagacacattgggcgtcaatgctggtcctttgatcaatcaatccacatcaagcaagcaatttttggatgagtgcttatcatctgatgatcctttggtcaaagaatcagctgactgggcaaggattgcaatcagccgtgcagtttcaggttga

SEQ ID NO: 594 - protein, 304 aa, Hordeum vulgare
MRGRSGPICRAFSCGCLQVIIQKVGGMESTKFAFLQYADQMMDLFLRVFACRNATVHEEAMLAIGALAYAAGSNFAKYMAQFYQYLEMGLQNFEEYQVCAITVGVVGDLCRALEDKILPYCDGIMTQLLKDLSSNQLHRSVKPPIFSCFGDIALAIGENFEKYLIYAMPMLQSAADLSAHTTATDDEMLDYTNQLRNGILEAYSGILQGFKSSPKTQLLMPYAPHILQFLDALHNGKDMDDSVMKTAIGVLGDLADTLGVNAGPLINQSTSSKQFLDECLSSDDPLVKESADWARIAISRAVSG

SEQ ID NO: 595 - DNA, 2607 bp, Hordeum vulgare
atggatatcactcagattctgctagctgctcagtctccagatggtaaccttcgctcagcagcagaagccaacatcaagcagttccaggagcagaatcttcccaacttcctcctatccttgtcggtggagttatcgaatgatgaaaggccaccagagtctagaagacttgctggtattatccttaagaattcactggacgcaaaagattctgcaaggaaggagctgctgattcagcaatgggtcagcttggatcactcgatcaaatcgcagattaaggagtcattgctgataacactaggatcttcggtgggtgatgcccggcagacgtcatcacaagtcattgcaaagattgcatccattgagataccccgtcgggaatggcaagacctcattgccaaattgctgagcaacatgactcagcctggggcctctgcgccactaaagcaagcaactctagaagcattggggtatgtctgtgaggagattcctcctgagcacttggagcaggatcaagtgaatgctgttctgactgctgtggttcaggggatgaaccagacagagctaagctctgaagtccgtcttgcagcagtcaaagctctatataatgctcttgactttgctgagagcaactttgcaaatgagatggagaggacctttataatgaaggtaatttgtgatactgctgtatctaaagaagtggagatcagacaggcagcctttgaatgccttgtggcaattgcatccacatattatgtgcacttagatccttatatgcaaaccatattcaacctgacagctaatgctgtaaaaggagacgaggaaccagttgcactgcaagctgttgagttctggagtactatttgtgaggaggagattgaactccaagaggaatatgagggatctgatgatgctaactcgactgtaaattatcgcttcattgaaaaggccctcccttcacttgttccaatgctgctagaaaccctgttgaagcaagaggaagatcaagagcaagatgataatgcttggaacatttccatgagtggtggaacatgccttggactcattgctagaactgtcggtgatgcaattgtccctcttgtgatgccatttgttgaagctaacatcacaaagccggattggcgttgtcgtgaggcagcaacttttgcatttggttctatccttgatggcccatcccttgagaaacttgctcccttggtgcaggctggactagatttcttgctcaatacaatgaatgatccaaacagccaggtaaaagacaccactgcttggactcttggacgggtatttgagcttttgcattctccatgcagtactaatccaatcatatcaaatgcaaaccttcctcgtatcatggctgtgttgctagagagtagcaaagatgttccaaatgtggctgagaaagtctgtggagccatatattttcttgcccaaggttatgaagatgcagagccggtgtcatctttgcttacaccttatcttcctaatgttatcgctgcactccttactgctgcggatcgtagtgatatgacccatgtgaggcttcgtgcatctgcttatgaagcgctgaatgagattgtaagagtcagcaacatacctgaaacttcaagcatcataggccagttattgcaggagatcatgagaagattgaatctgacatttgaccaccaaatattttcatcaggcgacaaggagaagcaaagcgatctgcaggctttgttgtgtggtgtactgcaggtcattatccagaaactgaacagctcggatgcaaagtccataattgcacagactgctgaccagttgatgcttctgttcctccgtgtctttgcttgccacagtgctactgtacatgaagaagcaatgctggccattggtgctcttgcttatgccactggcccagattttgagaaatacatgcctgagtttttgaagtaccttgaggcaggattgcagaattatgaagaataccaagtatgctccatctctgtaggggtggtgggtgatatttgccgtgccttggaagataaaatcttgcccttctgtgatgggattatgactgtgcttctcaaggatctctcaaactcacagctcaacaggtctgtcaagcccccaattttctcatgctttggagacattgctcttgccattggtgaaaattttgagaaatacctgccgtatgctatgccgatgcttcaaggggcggctgagcttcttgttgttttggatcaaaatgacgaggatatggttgattatggtaaccagctcagacggggaatttttgaggcatactctggcatactacagggtctaaagggcgcaaaagctcagctgatgataccttatgcaggccatctattgcaattcactgaagctgtctacaaagatgggagcagggatgagagcgtgacaaaagccgccgttgctgtcctgggggatcttgcggacacacttgggccaatctctaaggatctgttcaagagccacctcttccatgttgagttcttgagggagtgcctcgatctggatgatgaagtgagggagacggcgtcatggacccaggggatgataaaccaagcgatagtttcttag

SEQ ID NO: 596 - protein, 868 aa, Hordeum vulgare
MDITQILLAAQSPDGNLRSAAEANIKQFQEQNLPNFLLSLSVELSNDERPPESRRLAGIILKNSLDAKDSARKELLIQQWVSLDHSIKSQIKESLLITLGSSVGDARQTSSQVIAKIASIEIPRREWQDLIAKLLSNMTQPGASAPLKQATLEALGYVCEEIPPEHLEQDQVNAVLTAVVQGMNQTELSSEVRLAAVKALYNALDFAESNFANEMERTFIMKVICDTAVSKEVEIRQAAFECLVAIASTYYVHLDPYMQTIFNLTANAVKGDEEPVALQAVEFWSTICEEEIELQEEYEGSDDANSTVNYRFIEKALPSLVPMLLETLLKQEEDQEQDDNAWNISMSGGTCLGLIARTVGDAIVPLVMPFVEANITKPDWRCREAATFAFGSILDGPSLEKLAPLVQAGLDFLLNTMNDPNSQVKDTTAWTLGRVFELLHSPCSTNPIISNANLPRIMAVLLESSKDVPNVAEKVCGAIYFLAQGYEDAEPVSSLLTPYLPNVIAALLTAADRSDMTHVRLRASAYEALNEIVRVSNIPETSSIIGQLLQEIMRRLNLTFDHQIFSSGDKEKQSDLQALLCGVLQVIIQKLNSSDAKSIIAQTADQLMLLFLRVFACHSATVHEEAMLAIGALAYATGPDFEKYMPEFLKYLEAGLQNYEEYQVCSISVGVVGDICRALEDKILPFCDGIMTVLLKDLSNSQLNRSVKPPIFSCFGDIALAIGENFEKYLPYAMPMLQGAAELLVVLDQNDEDMVDYGNQLRRGIFEAYSGILQGLKGAKAQLMIPYAGHLLQFTEAVYKDGSRDESVTKAAVAVLGDLADTLGPISKDLFKSHLFHVEFLRECLDLDDEVRETASWTQGMINQAIVS

SEQ ID NO: 597 - DNA, 2619 bp, Oryza sativa
atgtcactggatattactcaagttctcttgagtgcacaatctcctgatggcgcgactaggaagcttgctgaagaaagccttaagcagttccaggagcaaaacctcccaggtttcttgttctccctctcaaatgagttggccaatgaggagaaacctgaggaaagccggaggttggctggcttgattctcaagaatgcactggatgccaaggagcagcacaggaagaatgagcttttccagagatggctggcactagatgttggcgttaaggcacagattaaaggatttcttttgcaaactctctcatctcctgttgcaagtgccagatctacctcttctcaagttatcgcaaaggttgctggaattgagattccacagaagcaatggcctgaacttattgcgtcgttgctctcaaacatacatcaggtccagccaaatgtcaagcaagcgacgcttgagacacttggctacttatgtgaagaagtttctccagaagctgttgaccaagaccaagtcaataaaattcttactgctgttgttcagggtatgaatgcttctgaagggaattctgatgtgaggcttgcagcaacacgggcattgtataatgcattgggctttgctcaggttaacttctccaacgacatggaacgtgattatatcatgagagttgtttgtgaagcaactcagtccactgatgtgaagataaggcaggctgccttcgagtgcttggtggctatctcatccacttattatgacaagctggctacgtacatgcaggacatatttaatattactgctaaggctgttaggggagatgaggagtcagttgcactccaggccattgaattttggagctccatatgtgatgaggaaattgacattttggatgagtacagtagtgagtttacagctgactctgatgttccttgctactattttatcaagcaagcacttcctgccttagtgccaatgctgctagagaccctcctcaagcaggaggaagaccaagacttggatgaaggtgcttggaatcttgcaatggctgggggtacttgtttgggccttgtggcgagaactgttggggatgatattgtacctcttgtgatgccttttgttgaggagaacataacaaagcctgattggaggcacagggaggctgcaacatatgctttcggttccattttggagggcccatcagctgataaacttgctcctcttgttaatgtcgcattgaattttatgttgtctgcactggtgaatgacccaagtaaccatgtgaaggacacaactgcttggacccttggaagaatatttgagtttcttcatggttctgcacttgaaactgctcctattatcacatctgagaactgtcagcaaatacttaccgtgcttcttcaaagcatgaaggatgtcccaaatgtggcagagaaggcatgcggagcactctatttccttgctcaaggctatgtggatgcaggatccgcttcgccgctaactcccttcttccaagatattattcagagccttctctttgttactcatagggaagatgctggagaatccagattgcgtactgcagcttatgaaactctaaatgaagttgtcagatgctccattgaagaaacaggccctattgttatgcagttggtacctgtgatcatgatggagctccatcagacacttgaggcaggaaagttatcaactgatgagagggagaagcggagcgaactgcagggccttctctgtggttgtttgcaggtcataatccagaagttgggagcgatggagtcaacaaaatattccttcttgcaatatgccgatcaaatgatggaactgtttttgagagtttttgcctgtcgaaacgccactgtgcatgaggaggctatgcttgctattggtgcattggcatatgcggcaggtccaaacttttcgaagtacatgcctcagttttatcagtatttggagatgggactacagaactttgaggagtatcaggtctgtgccattaccgtgggtgttgtgggtgatttgtgcagggcactggaggacaaaattctgccttactgtgatggaatcatgacccaactcctgaaggacttgtcgagcaatcagttgcatagatctgtaaagccacctatattctcatgctttggcgatattgcactggcaattggggagaactttgagaagtatttgatatatgccatgcccatgctacaaagtgcagcagatttgtcggcgcatgctgctgcagctgatgatgaaatgctcgattacaccaaccaattaaggaatggaatactggaagcatactctggtattcttcaaggatttaagagctcccctaagacacaattactgatgcagtatgctcccaatattcttaatttccttgatgctctttacaatgggaaggatatggatgatactgtgatgaagactgcgataggtgtactgggagatctcgcggacacgttgggtgtccatgctggccctttgatcaatcaatctatctcaagcaagaaatttttggaggagtgcttagcatctgatgatccactggtcaaagagtcagctgattgggcaagggttgcaatcagccgtgcggtttcaggttga

SEQ ID NO: 598 - protein, 872 aa, Oryza sativa
MSLDITQVLLSAQSPDGATRKLAEESLKQFQEQNLPGFLFSLSNELANEEKPEESRRLAGLILKNALDAKEQHRKNELFQRWLALDVGVKAQIKGFLLQTLSSPVASARSTSSQVIAKVAGIEIPQKQWPELIASLLSNIHQVQPNVKQATLETLGYLCEEVSPEAVDQDQVNKILTAVVQGMNASEGNSDVRLAATRALYNALGFAQVNFSNDMERDYIMRVVCEATQSTDVKIRQAAFECLVAISSTYYDKLATYMQDIFNITAKAVRGDEESVALQAIEFWSSICDEEIDILDEYSSEFTADSDVPCYYFIKQALPALVPMLLETLLKQEEDQDLDEGAWNLAMAGGTCLGLVARTVGDDIVPLVMPFVEENITKPDWRHREAATYAFGSILEGPSADKLAPLVNVALNFMLSALVNDPSNHVKDTTAWTLGRIFEFLHGSALETAPIITSENCQQILTVLLQSMKDVPNVAEKACGALYFLAQGYVDAGSASPLTPFFQDIIQSLLFVTHREDAGESRLRTAAYETLNEVVRCSIEETGPIVMQLVPVIMMELHQTLEAGKLSTDEREKRSELQGLLCGCLQVIIQKLGAMESTKYSFLQYADQMMELFLRVFACRNATVHEEAMLAIGALAYAAGPNFSKYMPQFYQYLEMGLQNFEEYQVCAITVGVVGDLCRALEDKILPYCDGIMTQLLKDLSSNQLHRSVKPPIFSCFGDIALAIGENFEKYLIYAMPMLQSAADLSAHAAAADDEMLDYTNQLRNGILEAYSGILQGFKSSPKTQLLMQYAPNILNFLDALYNGKDMDDTVMKTAIGVLGDLADTLGVHAGPLINQSISSKKFLEECLASDDPLVKESADWARVAISRAVSG

SEQ ID NO: 599 - DNA, 2625 bp, Physcomitrella patens
atggcgctggaggtgacgcaaatactgcttaacgcccagtctcctgatgggacggtcaggaagattgcagaggataatcttaagcaattccaggagcacaacctttctgcttttttggtatctctatctcatgaacttgccaataatgataaacctcccgaaagccgaaggcttgccggtttgatacttaaaaactccttggatgctaaggagagtgctcgaaagcaagaacttgtgacgagatgggtggcgttggatccaagcgtgaaggcgcaaatcaagactgctctttctcaaacccttgcctcagtggttgcggatgctcgtcatacttccgcgcaggttattgccaagattgctgctatcgagctgcctcagggcgaatggcccgagctggttgggtcattgttggcaaatatgggaggtcctcaaatggagcaacccgcgcatctgaagcaagcgacactagaagcccttgggtacgtatgtgaggaggtttcagccgacatcctggctcaggagcaggtgaactcaatactgactgccgttgtccagggcatgaactcgtccgagactagcaacgatgtccgacttgctgccacacacgctctgtataatgcccttgatttcgctcaaaccaacttcgaaaacgatatggagcgcgactatattatgagggtggtctgcgaagctactctctcaccagatgtcagagtccgccaggctgcctttgaatgcctggtctcgattggatccacctattatgacaagcttgcaccgtacatgcaagatattttcgcaatcacgtccaaagcagttagggaggatgaggagccagttgcccttcaagctactgaattttggagttccatctgtgatgaagagatcgagattcaggaagaatacagtgctgatttctctggagattcggaggtgccatacttccagttcatcaagcaggccttgcctgcccttgtcccactgttgttggaaactttgacaaagcaagaggaagatcaggacttggaagagggagcttggaacttgtccatggccggtgggacatgtttgggtttggtggctcgcaccgtcggggacgacgttgtgcctcttgttatgcctttcgtccaagagaacgtctcgaagcctgattggaggtgtcgggaagcagctacgtacgcctttggatccattcttgaggggccatctctagacaagctaaccccccttgtgaatgtggccctcaccttcatgctgaacgcaatgaaagattcgaacaaccatgttaaggatactactgcatggacgttaggaaggatcttcgagttccttcacggtccctcaattgaaactccagttatcaaccaaaccaacttgcacttgatacaggctgttcttctcgagagtattaaggacactcctaatgtggcggagaaagtctgtggagcaatctatttcttggcacaaggctatgaggaaagtggacagacatcctctccattatctcctttcttccagagcattgttcaagctctgctcgccactactgagcgggaggatagcggagattctcgactgcgaacatctgcatatgaaactctgaacgaagttgttagaatctcaacggaggatactgcttcgattgtcgtgcagctggtgcctgtgattatgcagaaactcaatcacactttagaaatggctgtcctctcgtctgacgaccgggagaagcagagcgaactgcaggctcttctgtgtggtgttctgcaggtcatcatccagaaattgggtgcatctgaaacgaccaagtatggcatcgtgcagtacgccgatcaaatgatgggtttgttccttcgtgttttcgcttgccgcagtgcaactgttcatgaagaagctatgcttgcgatcggagctcttgcatatgctacaggggctgagtttggaaaatacatgggcgagttttaccgttacttggaaatgggtctccaaaactttgaagaatatcaggtatgtgcagtaactgttggtgtagtcggtgacatttgtcgtgctctggaggagaaggttcttccttactgcgatggaatcatgacccagcttctgaaggacttgtccagcaatcagttgcatcgctcagtgaaaccacccattttctcgtgctttggggacattgccctggcaattggagagcactttgagaagtatctgatttacgcgatgccaatgcttcaaggagctgcggagctatctgctcaaccgtcaggtagtgacgatgaaatgattgaatacaataatcaactccgcagtggcattttcgaggcttactctggtattttccaaggatttaaatctaacaaggcggagctgatggcaccatacgctggacatattctgcaatttattcagaatgtgtatcatgacaaagacagggacgaagtggtaactaaggctgctattggagtcatgggtgatttggctgacactttgggggctagctctgccgctttgttccaacgtacagtattcttcaaagactttcttgatgaatgtacttcgtcggatgaccagcagctgaaagagacagcggagtgggcccagggcactatctcacgcatattatctggttga

SEQ ID NO: 600 - protein, 874 aa, Physcomitrella patens
MALEVTQILLNAQSPDGTVRKIAEDNLKQFQEHNLSAFLVSLSHELANNDKPPESRRLAGLILKNSLDAKESARKQELVTRWVALDPSVKAQIKTALSQTLASVVADARHTSAQVIAKIAAIELPQGEWPELVGSLLANMGGPQMEQPAHLKQATLEALGYVCEEVSADILAQEQVNSILTAVVQGMNSSETSNDVRLAATHALYNALDFAQTNFENDMERDYIMRVVCEATLSPDVRVRQAAFECLVSIGSTYYDKLAPYMQDIFAITSKAVREDEEPVALQATEFWSSICDEEIEIQEEYSADFSGDSEVPYFQFIKQALPALVPLLLETLTKQEEDQDLEEGAWNLSMAGGTCLGLVARTVGDDVVPLVMPFVQENVSKPDWRCREAATYAFGSILEGPSLDKLTPLVNVALTFMLNAMKDSNNHVKDTTAWTLGRIFEFLHGPSIETPVINQTNLHLIQAVLLESIKDTPNVAEKVCGAIYFLAQGYEESGQTSSPLSPFFQSIVQALLATTEREDSGDSRLRTSAYETLNEVVRISTEDTASIVVQLVPVIMQKLNHTLEMAVLSSDDREKQSELQALLCGVLQVIIQKLGASETTKYGIVQYADQMMGLFLRVFACRSATVHEEAMLAIGALAYATGAEFGKYMGEFYRYLEMGLQNFEEYQVCAVTVGVVGDICRALEEKVLPYCDGIMTQLLKDLSSNQLHRSVKPPIFSCFGDIALAIGEHFEKYLIYAMPMLQGAAELSAQPSGSDDEMIEYNNQLRSGIFEAYSGIFQGFKSNKAELMAPYAGHILQFIQNVYHDKDRDEVVTKAAIGVMGDLADTLGASSAALFQRTVFFKDFLDECTSSDDQQLKETAEWAQGTISRILSG

SEQ ID NO: 601 - DNA, 2628 bp, Physcomitrella patens
atggcgctggaggtaacacagatacttttaaacgctcagtctcctgatggaacggtcaggaagattgccgaggataaccttaagcagtatcaagagcagaatctctctgcctttttggtatctctatctcatgaacttgccaatgatgataagccgcctgagagtcgaaggctggctggtttgatcctcaaaaactcgctggatgctaaggaaagttctcggaagcacgaactcgtgacaagatgggtggccttagactctactgtgaaggctcaaatcaagcctgctctttctcaaactctctcctccatggtggcggatgctcgtcacacagctgcgcaagttatcgctaagattgctgctattgaactgcctcagggcgattggcctgagcttgtggggtcacttttggccaacatggggggccctcaagtagagcaaccctcacatctgaaacaggcaacactagaagctcttggctatgtctgcgaggaggtttctgcggagatccttgctcaagagcaggtgaattctatcctgactgctgtggtccagggaatgaactcatccgagacgagtaacgacgtccgacttgcagccactcacgctctgtacaatgctcttgacttcgcgcaaacgaatttcgagaacgacatggaacgtgactacatcatgaggatggtttgtgaggccacgctctcacctgatgttcgagttcgtcaggccgcatttgaatgtttagtatccattggatctacgtactatgacaagctcgcaccgtacatacaagacattttcgccatcacttctaaggcagtcaaggaagatgaggagccggttgcacttcaagccatcgagttttggagctctatttgtgacgaagaaattgagattcaggaagattacaatgttgatttttctggtgactcggaggtgccgtatttccagttcatcaaacaggcattgcctgctttagtccctatgttgttagaaactcttacaaaacaagaagaggaccaggatttggatgaaggggcgtggaacttgtccatggccggtgggacgtgtctgggtctggtcgctcgtgccgtcggggacgatattgtgcctctggtcatgccctttgtagaacaaaatgtctcaaatccattggattggagatgtcgtgaggcggccacatacgcttttggttccattcttgagggtccttctttggacaagctgactcctcttgtaaatcttgcgctcaacttcatgttgagtgcaatgaaagatgtaaataatcacgtcaaggatactacagcatggacgttgggaaggatctttgagttccttcatggaccttcgcttgagcctccagttatcaccccaaccaatctgcccttgatcattgctgtgcttctcgagagcatcaatgatacacctaacgtggctgagaaggtttgtggagcaatttatttcctggcacagggttatgaggacggtgggcagtcatccactcctctttctccttacttcccgaaaatcctggaagctttgttggctgcgacggcgagagaggacagcgtagactctcggcttcgaacttgtgcatatgagactctaaacgaagttgtgagaatatcaacggatgacactgccccaatcgttgtgcagttagtgcctgtgattatggagaaactcaatcaaactttggaaatggccgtgctttcttctgacgatcgggagaagcagattgaactgcaggctcttctctgtggtgttctccaggtcatcattcaaaagttgggtgcatctgagctcacaaagtacggcgtcgtacagtttgccgatcagatgatgggtctgttcctccgcgtctttgcttgccgaagtgccacagtccacgaggaagctatgcttgcaatcggagctttggcatatgcaacgggtgctgaattcggaaaatacatgagcgaattttaccggtacttggaaatgggtcttcaaaactttgaagaatatcaggtgtgtgctgttacagttggtgtggtcggggatatctgtcgcgccttggacgagaaggtgctcccctactgtgatggaattatgacccagcttctgaaggacttatcaagcaatcagttgcatcgctcagtgaagccacccattttctcatgcttcggggatatcgccctggctatcggggagcactttgagaaatatttgatttacgcaatgcccatgctccaaggagctgcagagctttctgcccaacctacagctggtgatgatgaaatgaccgattacagtaaccagctacgcagtggtattttggaggcatactccggtattttccaaggtttcaagtcaaacaaggcggacttgatggcaccttatgctgcgcatattctgcaatttattgagaacgtttatcaggacaaagacagggatgatgtggtgacgaaggctgcaattggagttatgggtgatttggctgatacgcttggagccaatgctgcggctttgtttcaatgtacagtattctataaagacttccttgatgaatgcatttcttcagatgaccagcagctgaaagagacagctgagtgggctcagggcacaatcacacgcattctatctggttga

SEQ ID NO: 602 - protein, 875 aa, Physcomitrella patens
MALEVTQILLNAQSPDGTVRKIAEDNLKQYQEQNLSAFLVSLSHELANDDKPPESRRLAGLILKNSLDAKESSRKHELVTRWVALDSTVKAQIKPALSQTLSSMVADARHTAAQVIAKIAAIELPQGDWPELVGSLLANMGGPQVEQPSHLKQATLEALGYVCEEVSAEILAQEQVNSILTAVVQGMNSSETSNDVRLAATHALYNALDFAQTNFENDMERDYIMRMVCEATLSPDVRVRQAAFECLVSIGSTYYDKLAPYIQDIFAITSKAVKEDEEPVALQAIEFWSSICDEEIEIQEDYNVDFSGDSEVPYFQFIKQALPALVPMLLETLTKQEEDQDLDEGAWNLSMAGGTCLGLVARAVGDDIVPLVMPFVEQNVSNPLDWRCREAATYAFGSILEGPSLDKLTPLVNLALNFMLSAMKDVNNHVKDTTAWTLGRIFEFLHGPSLEPPVITPTNLPLIIAVLLESINDTPNVAEKVCGAIYFLAQGYEDGGQSSTPLSPYFPKILEALLAATAREDSVDSRLRTCAYETLNEVVRISTDDTAPIVVQLVPVIMEKLNQTLEMAVLSSDDREKQIELQALLCGVLQVIIQKLGASELTKYGVVQFADQMMGLFLRVFACRSATVHEEAMLAIGALAYATGAEFGKYMSEFYRYLEMGLQNFEEYQVCAVTVGVVGDICRALDEKVLPYCDGIMTQLLKDLSSNQLHRSVKPPIFSCFGDIALAIGEHFEKYLIYAMPMLQGAAELSAQPTAGDDEMTDYSNQLRSGILEAYSGIFQGFKSNKADLMAPYAAHILQFIENVYQDKDRDDVVTKAAIGVMGDLADTLGANAAALFQCTVFYKDFLDECISSDDQQLKETAEWAQGTITRILSG

SEQ ID NO: 603 - DNA, 2613 bp, Populus trichocarpa
atggcattggagatcactcagtttctattggctgcccaatcaccggatgcaaatatccgtactcaggcagaggccagtcttaggcagttccaagagcagaacttgccccttttccttctatccttgtcagtggagcttgcaaacaatgtaaagcctttagaatcacgtagattggctggtattgttcttaaaaactctttagatgctaaagattctgtgagaaaggaacatcttgttcaacaatggatgacaattgaaatttctatcaaatcacaaatcaaagactcactcttgagaactcttgggtcatctgcatcggaagcaaggcacacttctgcccaagtaattgcaaaagttgcttccattgagattccacggaagcagtggcctgagctcatcggatcattgcttaataatatgacccagcaagatagtccggcagctttgaaacaggcgaccctggaaactcttggatatgtttgtgaggtgatatcgcatcaggatcttgtgcaggatgaagttaactctgttctcactgctgttgtccaaggcatgaaccttgctgaacacagtcatgaagtacgtattgcagcaacaaaggccttgtataatgccttagattttgcccagaccaactttgacaatgaaatggagcgcaattacatcatgaaggtggtatgtgaaacagcaatttccaaagaggcggatatcaggcaggctgctttcgagtgtcttgtttctatagcatcaacatactatgaggtgcttgaaccttatatgcagaccctcttccagctaacatcaaatgctgtaaaaggggatgaagagagtgttgccctccaagcaattgaattctggagctccatctgcgatgaagagatagagcttcaagaatatgggactgttgaaggtggggattctgggtctgctcattcacgcttcatagaaaaggccctcccatatcttgttcctttgttgttggatactatgttgaaacaggaggatcaggatcaggatgatagcatttggaatatatccatggcagggggaacctgtcttggtcttgttgctagaactgttggggattctattgtgaaacttgtaatgccctttgtcgagggtaatattcttaacccagattggcattgtcgcgaggcagccacatatgcatttggctccattctagaaggccctagcgttgaaacattgggtccacttgttactaatggcttggattttctgcttaatgcaataagggatgaaaataataatgtcaaggacacaactgcctggacgcttagtcgtatatttgagtttttgcactgtcctgccagtggattttctgtgatttccccggagaagctggaaagaattgtaactgtcttgctggagagtattaatgatgctccacatgtagctgaaaaggtttgtggggcaatctattaccttgcacagggatatgaagattctggaacaagttcctcgcttctaactcaacacatccctaggattatctctgaacttctcaaaactgctgagcggacagatgggagcgactttaagctcaggacttctgcttatgagacattgaacgaggttgttaggtcttccaatgttgtggaaacatcactaattattttggagctgctcaaaagcatcttgcataagttggggcagactctagagcttcaaattgtctcatcagatgatagagagaagcaaggggacttgcaagcttccctttgtgctgttatccaggtgatcatccaaaagcttagcagcactgatgagactaagcccagtacacttcaggcagcagatccaattatgattctgctcctcagggtttttgcttgccgcagctctactgtgcatgaggaagcaatgcttgcaatcggtgcactggctcatgcctctggtccagaattcgagaagtatatgcctgagttatacaaatacctggagatgggactacagaattttgaggagtacgaggtttgtgccatcacagttggggtgattggtgacatttgccgcgcactggaggacaaggttttaccatactgtgatgggatcatgaaccaccttgtctgcaatctccaaagtgctgaactcaaccggtcggtcaagcctcccatattctcctgctttggggacattgctcttgctataggcgagcaattctctaagtacattgagcctacagtagcaatgatgcggagtgctgctgaggtctgtgctcagatggataatagtgatgaggagttgatggattatggcaaccagcttaagcgtagcatatttgaagcttattctggtattcttcagggattcaaagattccaagcctgagttgatgctgccacatgctggtcaccttttccagttcatagaattggttttcagagagaaatatagggatgagagtgttacaaaagcagcagttgcggtgatgggtgatctggcagatgcccttggtccaaacacgaaaatactgtttaaagacaaagcattctgcgttcaattcctcggcgagtgtcttcaatctgaagatgaacatctcaaagagactgcaaattggacccaagtgatgattgctcgtgttgtttcatga

SEQ ID NO: 604 - protein, 870 aa, Populus trichocarpa
MALEITQFLLAAQSPDANIRTQAEASLRQFQEQNLPLFLLSLSVELANNVKPLESRRLAGIVLKNSLDAKDSVRKEHLVQQWMTIEISIKSQIKDSLLRTLGSSASEARHTSAQVIAKVASIEIPRKQWPELIGSLLNNMTQQDSPAALKQATLETLGYVCEVISHQDLVQDEVNSVLTAVVQGMNLAEHSHEVRIAATKALYNALDFAQTNFDNEMERNYIMKVVCETAISKEADIRQAAFECLVSIASTYYEVLEPYMQTLFQLTSNAVKGDEESVALQAIEFWSSICDEEIELQEYGTVEGGDSGSAHSRFIEKALPYLVPLLLDTMLKQEDQDQDDSIWNISMAGGTCLGLVARTVGDSIVKLVMPFVEGNILNPDWHCREAATYAFGSILEGPSVETLGPLVTNGLDFLLNAIRDENNNVKDTTAWTLSRIFEFLHCPASGFSVISPEKLERIVTVLLESINDAPHVAEKVCGAIYYLAQGYEDSGTSSSLLTQHIPRIISELLKTAERTDGSDFKLRTSAYETLNEVVRSSNVVETSLIILELLKSILHKLGQTLELQIVSSDDREKQGDLQASLCAVIQVIIQKLSSTDETKPSTLQAADPIMILLLRVFACRSSTVHEEAMLAIGALAHASGPEFEKYMPELYKYLEMGLQNFEEYEVCAITVGVIGDICRALEDKVLPYCDGIMNHLVCNLQSAELNRSVKPPIFSCFGDIALAIGEQFSKYIEPTVAMMRSAAEVCAQMDNSDEELMDYGNQLKRSIFEAYSGILQGFKDSKPELMLPHAGHLFQFIELVFREKYRDESVTKAAVAVMGDLADALGPNTKILFKDKAFCVQFLGECLQSEDEHLKETANWTQVMIARVVS

SEQ ID NO: 605 - DNA, 2616 bp, Populus trichocarpa
atggcaatggaagtgacccaggtgcttttgaatgcccaatctatagatgggaatgtgcggaagcatgcagaagaaagcttaaaacagtttcaggagcaaaacctgcccagttttttgctctctctctccggagagctagctaatgatgagaagcctgttgacagtcgtaaattagcaggtttaattcttaaaaatgcgttggatgcaaaggaacagcatagaaagcttgagcttgttcaaagatggttgtcgctggacaacaatgcaaagggtcaaattaaggcatgtttgttgaagacacttgcttctcctgtaccagatgcacggtcaactgcatctcaagttattgccaagattgcagggattgagttgcctcagagacagtggccagagctgattggatcacttttatccaatattcatcagttacctgctcatgtcaagcaagctactttagagactcttggatatttgtgtgaggaagtctcacctgatgttgtagatcaagaccatgtaaacaagatacttacagcagtagtacagggcatgaacgcaactgaaggaaacaatgatgttaggcttgctgcaacccgagcactgtacaatgcacttggatttgctcaggcaaacttcagcaatgatatggagcgtgattatatcatgagagtggtctgcgaggcaactttatccccagaaatgaagataagacaagctgcttatgagtgtctggtctctatttcatcaacatactatgagaaattggctccttatatgcaggatatctttaacatcacggcgaaggccgtgagggaagatgaagaacctgtagcccttcaagcaattgaattctggagttcaatatgtgatgaggagatagatatcttggaagaatatgggggtgatttcactggggattctgatgttccttgcttttactttattaagcaggctctccctgctttggtcccaatgttgttggagactctcctaaagcaagaggaggatcaggatcaagatgaaggagcttggaatattgcaatggctggtggaacatgccttggtttggttgcaaggactgtgggagatgatattgtgcagcttgttatgcaattcattgaagataacattacaaaaccagattggaggcatagagaggcagctacttatgcatttggctcgatcttggaaggtccttcccctgagaaactaacgcctcttgttaatgttgctttgaacttcatgctgactgctttgacaaaggatccaaataaccatgtgaaggatacaactgcttggacccttggtcgaatctttgaattcctccatggttcaactgtggatacaccgataattactcaagcaaattgccaacaaattgtcacggtactactccagagcatgaaggacgttgccaatgtagcagagaaggcatgtggtgccctctatttccttgcccagggttatgaagaggtgaccccatcatcacctcttactccttacttccaggaaattgtccagacacttctctttgttacccacagagaggatgctggggagtcccgattaaggactgctgcatatgaaacgttgaatgaggtggtgagatgctcgactgatgaaacagcaccaatggtgctgcaactggttcctgtcatcatgacggagcttcacaatactcttgaagggcagaagctttcttctgatgagagagagaagcagggtgaattgcaagggcttctctgtggttgcttacaggtcataattcagaagttaggctcctctgagccaactaagtatgtgttcatgcaatatgtagatcagattatggggctcttcctgagggtctttgcttgtagaagtgcaactgtgcatgaggaggccatgttagccataggagcccttgcctatgcaactggtcctgattttgcaaaatacatgccagagttttacaagtacctagaaatgggccttcagaattttgaggagtaccaagtctgtgctgtgactgtcggtgtggtgggtgatatctgcagggcattggaagataaaattttgccttactgtgatggtattatgactcagcttctcaaggatttatcaagcaaccagctgcatagatctgtgaagcctcctattttctctagctttggcgacattgccctggcaataggagagaattttgagaagtacttgatgtatgccatgccaatgctgcaaagtgccgcagagttgtctgcccacacatctgttgctgacgatgaaatgactgaatacacaaattctttgagaaatggaattttggaggcatactctggaattcttcaagggtttaagaattctcctaaaactcagctcttgattccttatgcacctcacatcctgcagttcttggatagcatgtacatggagaaagacatggatgatgtcgttatgaaaactgcaattggagtcctgggagatttagcagatacactgggaagtaatgctggctctttgatacagcaatctctttctagcaaagactttttaaatgaatgtttgtcttctgatgaccatatgattaaggaatctgctgaatgggccaagttggccatcagtcgtgccatttctgtttga

SEQ ID NO: 606 - protein, 871 aa, Populus trichocarpa
MAMEVTQVLLNAQSIDGNVRKHAEESLKQFQEQNLPSFLLSLSGELANDEKPVDSRKLAGLILKNALDAKEQHRKLELVQRWLSLDNNAKGQIKACLLKTLASPVPDARSTASQVIAKIAGIELPQRQWPELIGSLLSNIHQLPAHVKQATLETLGYLCEEVSPDVVDQDHVNKILTAVVQGMNATEGNNDVRLAATRALYNALGFAQANFSNDMERDYIMRVVCEATLSPEMKIRQAAYECLVSISSTYYEKLAPYMQDIFNITAKAVREDEEPVALQAIEFWSSICDEEIDILEEYGGDFTGDSDVPCFYFIKQALPALVPMLLETLLKQEEDQDQDEGAWNIAMAGGTCLGLVARTVGDDIVQLVMQFIEDNITKPDWRHREAATYAFGSILEGPSPEKLTPLVNVALNFMLTALTKDPNNHVKDTTAWTLGRIFEFLHGSTVDTPIITQANCQQIVTVLLQSMKDVANVAEKACGALYFLAQGYEEVTPSSPLTPYFQEIVQTLLFVTHREDAGESRLRTAAYETLNEVVRCSTDETAPMVLQLVPVIMTELHNTLEGQKLSSDEREKQGELQGLLCGCLQVIIQKLGSSEPTKYVFMQYVDQIMGLFLRVFACRSATVHEEAMLAIGALAYATGPDFAKYMPEFYKYLEMGLQNFEEYQVCAVTVGVVGDICRALEDKILPYCDGIMTQLLKDLSSNQLHRSVKPPIFSSFGDIALAIGENFEKYLMYAMPMLQSAAELSAHTSVADDEMTEYTNSLRNGILEAYSGILQGFKNSPKTQLLIPYAPHILQFLDSMYMEKDMDDVVMKTAIGVLGDLADTLGSNAGSLIQQSLSSKDFLNECLSSDDHMIKESAEWAKLAISRAISV

SEQ ID NO: 607 - DNA, 2616 bp, Populus trichocarpa
atggcgatggaagtgacccaggtgctattgaatgcccaatctatagacgggaatgtgcggaagcatgcggaagaaagcttaaaacagtttcaggagcaaaacctgcctggttttttgttctccctctctggagagctagcaaatgatgagaagcctgttgatagccgtaaattagcaggcttaatacttaaaaatgcattggatgcaaaggaacaacatagaaagctcgagcttgttcaaagatggttgtcgttggacaacaatgttaagggtcaaattaaggtgtttttgttgaagacccttgcttctcctgtaccggatgcacggtcaactgcatctcaagttattgctaagattgctgggattgagttgcctcagcgacaatggccggagctgataggatcacttttatctaatattcatcagttacctgctcatgtcaagcaagctactttagagactcttggatatttgtgtgaggaagtctcacctgatgttgtagatcaagaccatgtaaacaagatacttacagcagtagttcagggcatgaatgcatctgaaggaaacaatgatgttaggcttgctgcaacccgagcactgtacaatgcacttggatttgctcaagcaaatttcagcaatgatatggagcgtgattatatcatgagagtggtctgcgagtcaacactgtccccagaagtgaagatacgacaggctgcttttgagtgtttggtctctatttcatcaacatattatgagaaattggctccttatattcaggatatctttaacatcacagcaaaagctgtgagggaagatgatgaacctgtagctcttcaagcaattgaattctggagttcaatatgtgatgaggagatagatatcttggaagaatatgggggtgatttcactggggattctgagattccttgcttttactttattaagcaggctctccctgctctggtccctatgctgttggaaactcttcttaagcaagaggaggatcaggatcaagatgaaggagcttggaatattgcaatggctggcggaacatgccttggtttggttgcaaggactgtgggagatgatattgtgcaacttgttatgccattcattgaagagaacattacaaaaccagattggaggcaaagggaggcagcgacttatgcatttggctcaatcttggagggtccttcccctgacaagctaacacctcttgttaatgttgcattgaacttcatgcttactgcattgaccaaggatccaaataaccatgtgaaggatacaactgcttggacccttggtcgaatctttgaattccttcatggttcaactgtggatacaccaataattactcaggcaaattgccaacaaattgtcactgtgctacttcagagcatgaaggacgttgccaatgtagcagagaaggcatgtggtgccctctatttccttgcccagggttatgaagaggtgagcccatcatctccccttactccttacttccaagaaattgtccaggcacttctcactgttacccacagagaagatgctggcgagtcccgattaaggactgctgcatatgaaacgttgaatgaggtggtgaggtgctcaactgatgaaaccgcacctatggtgctgcaactggttcctgtcatcatgatggagcttcacaatactcttgaagggcagaagctttcttctgatgagagagagaagcagggtgaattgcaagggcttctctgtggttgcttacaggtcataattcagaagttaggctcctctgagccaactaagtatgtgttcatgcaatatgcagaccagataatgggactcttcctgagggtttttgcttgtagaagtgcaacagtgcacgaggaggccatgttggctattggagcccttgcctatgcaactggtccagattttgccaaatacatgccagagttttacaagtacttagaaatgggccttcagaattttgaggagtaccaagtctgtgcggttactgttggtgtggtgggggatatttgcagggcattggaagataaaactttgccttactgtgatggtattatgactcagcttctcaaggacttatcaagtaaccagttgcatagatctgtgaagcctcccattttctctagctttggcgacattgccctggcaataggagagaattttgagaagtacttgatgtatgccatgcccatgctgcagagcgctgctgagttgtctgcccacacagctgatgctgatgatgaaattactgagtacacaaattctttgagaaacggaattttggaggcatattctggaattcttcaaggttttaagaattctcctaaaactcagctcttgattccttatgcacctcacatcctgcagttcttggatagcatgtacatggagaaagacatggatgatgtggtgatgaaaactgctattggagtccttggagatttagcagatacactgggaagtaatgctggttctttgatacagcaatctctctctagcaaagactttttaaatgaatgtttgtcttctgatgatcatatgattaaggaatctgccgaatgggccaagttggccatcagtcgtgccatttcagtttga

SEQ ID NO: 608 - protein, 871 aa, Populus trichocarpa
MAMEVTQVLLNAQSIDGNVRKHAEESLKQFQEQNLPGFLFSLSGELANDEKPVDSRKLAGLILKNALDAKEQHRKLELVQRWLSLDNNVKGQIKVFLLKTLASPVPDARSTASQVIAKIAGIELPQRQWPELIGSLLSNIHQLPAHVKQATLETLGYLCEEVSPDVVDQDHVNKILTAVVQGMNASEGNNDVRLAATRALYNALGFAQANFSNDMERDYIMRVVCESTLSPEVKIRQAAFECLVSISSTYYEKLAPYIQDIFNITAKAVREDDEPVALQAIEFWSSICDEEIDILEEYGGDFTGDSEIPCFYFIKQALPALVPMLLETLLKQEEDQDQDEGAWNIAMAGGTCLGLVARTVGDDIVQLVMPFIEENITKPDWRQREAATYAFGSILEGPSPDKLTPLVNVALNFMLTALTKDPNNHVKDTTAWTLGRIFEFLHGSTVDTPIITQANCQQIVTVLLQSMKDVANVAEKACGALYFLAQGYEEVSPSSPLTPYFQEIVQALLTVTHREDAGESRLRTAAYETLNEVVRCSTDETAPMVLQLVPVIMMELHNTLEGQKLSSDEREKQGELQGLLCGCLQVIIQKLGSSEPTKYVFMQYADQIMGLFLRVFACRSATVHEEAMLAIGALAYATGPDFAKYMPEFYKYLEMGLQNFEEYQVCAVTVGVVGDICRALEDKTLPYCDGIMTQLLKDLSSNQLHRSVKPPIFSSFGDIALAIGENFEKYLMYAMPMLQSAAELSAHTADADDEITEYTNSLRNGILEAYSGILQGFKNSPKTQLLIPYAPHILQFLDSMYMEKDMDDVVMKTAIGVLGDLADTLGSNAGSLIQQSLSSKDFLNECLSSDDHMIKESAEWAKLAISRAISV

SEQ ID NO: 609 - DNA, 2616 bp, Populus trichocarpa
atggcaatggagatcactcagtttctattggctgcccaatcaccagatgcaaatatccgtactcaggcagaggctagtcttaggcagttccaagagcagagcttgccccttttcctcttatcattgtcagtggagcttgcaaacaatgagaagcctttggaatcacgtaggttggctggtattgttcttaaaaactctttagatgctaaagattctgtgagaaaggaacatcttgttcagcaatggatggcaattgaaatttccatgaaagcacaaatcaaagacttgctcctgaggactcttgggtcatctgcatcagaagcaagacacacttctgcccaagtaattgcaaaagttgcttccattgagattccacggaagcagtggcctgagcttatcggatcattgcttaagaatatgacccagcaagatagtcctgcagctttgaaacaggcaacattggaaactcttggatatgtttgtgaggagatatcccaccaggatcttgtgcaggatgaagtgaactctgttctcactgctgttgtccaaggcatgaaccttgctgaacatagttgtgaagtacgccttgctgctacaaaggccttatataatgccttagattttgctcagaccaactttgaaaatgatatggagcggaattacataatgaaggtggtatgcgagacagcaatttctaaagaggcagatatcaggcaggctgcttttgagtgtcttgtttctatagcgtcaacatactatgatgtgcttgaaccttatatgcagaccctcttccagctcacatcaaatgctgtgaaaggggatgaagagagtgttgccctccaagcaatagaattctggagctccatttgtgatgaagagatagagcttcaagaatatgggacccttgaaggtggagattcggggtctactcattcacgcttcatagaaaaggccctcccatatcttgttcctttgttgttggatactttgttgaaacaggaggaggatcaggatcaggatgatagcatttggaatatatccatgtcagggggcacctgtctaggtcttgttgctagaactgttggggattctgttgtgaaactagtaatgccctttgtagagggtaatattctgaagccagattggcattgtcgtgaggcagccacatatgcatttggctcaattctagaaggccctagccttgaaacattaggtccgcttgtttctaatggcttggattttctgcttaatgcgatgagggatgaaaataatcatgttaaggacacaactgcatgggctcttagtcgtatttttgagtttttgcactgtcctgccagtggattttctgtggtttccccagagaacctggaaaggattgtaactgtcttgctggagagtattaatgatgctccaaatgtagctgagaaggtttgtggggcaatctattaccttgcacagggatatgaagatgctggaacaaattcctcacttctaactcaatacatccctaggataatctctgaacttctcaaaactgctgagcggtcagatgggagcgattctaagatcaggacttctgcttatgaaacattgaacgaggttgttaggtcgtccaatattgtggaaacatctcaaattattttggaactgctcaaaagcgtcttgcataagttggggcagactatagatcttcaaattgtctcatcagacgatagagagaagcaaggggacttgcaagcatccctttgtgctgttatccaggtgattgtccaaaagcttagcagcactgatgagaccaagcccagtatacttcaggctgcagatacaattatgtttctgttcctcagggtttttgcttgccgcagatctactgtgcacgaggaagcaatgcttgcaattggtgcactggctcatgcctctggtccagaatttgagaagtacatgcctgagctatataagtacctggagatgggattacagaattttgaggaatatgaggtttgtgccatcacagttggggtgattggtgacatttgccgtgcattggaggacaaggtcttaccttactgtgatgggatcatgaaccaccttgtccgcaatctccaaagtgctgaactccaccggtcagttaagcctccaatatttgcctgctttggtgatgttgctcttgggataggtgagcaattctctaagtacgttgagcctacagtagcaatgatgcggagcgctgctgaggtctgtgctcagatggacaatagtgatgaggagttgatggattatggcaaccagcttaagcgtagcatatttgaagcttattctggtattcttcagggattcaaagattccaagcctgagttgatgctgccacatgctggtcatcttttccagttcatagaagtggttttcagagagaaatatagggatgagagtgtcacaaaagcagcagttgccgtgatgggtgatctggcggatgctcttggtcctaacacaaagatactgttcaaagacaacgcattctgcattcaatttcttggcgagtgtcttcaatccgacgacgaacatctcaaagagactgcaaactggacccaagtgatgatcgctcgcgttgtttcatga

SEQ ID NO: 610 - protein, 871 aa, Populus trichocarpa
MAMEITQFLLAAQSPDANIRTQAEASLRQFQEQSLPLFLLSLSVELANNEKPLESRRLAGIVLKNSLDAKDSVRKEHLVQQWMAIEISMKAQIKDLLLRTLGSSASEARHTSAQVIAKVASIEIPRKQWPELIGSLLKNMTQQDSPAALKQATLETLGYVCEEISHQDLVQDEVNSVLTAVVQGMNLAEHSCEVRLAATKALYNALDFAQTNFENDMERNYIMKVVCETAISKEADIRQAAFECLVSIASTYYDVLEPYMQTLFQLTSNAVKGDEESVALQAIEFWSSICDEEIELQEYGTLEGGDSGSTHSRFIEKALPYLVPLLLDTLLKQEEDQDQDDSIWNISMSGGTCLGLVARTVGDSVVKLVMPFVEGNILKPDWHCREAATYAFGSILEGPSLETLGPLVSNGLDFLLNAMRDENNHVKDTTAWALSRIFEFLHCPASGFSVVSPENLERIVTVLLESINDAPNVAEKVCGAIYYLAQGYEDAGTNSSLLTQYIPRIISELLKTAERSDGSDSKIRTSAYETLNEVVRSSNIVETSQIILELLKSVLHKLGQTIDLQIVSSDDREKQGDLQASLCAVIQVIVQKLSSTDETKPSILQAADTIMFLFLRVFACRRSTVHEEAMLAIGALAHASGPEFEKYMPELYKYLEMGLQNFEEYEVCAITVGVIGDICRALEDKVLPYCDGIMNHLVRNLQSAELHRSVKPPIFACFGDVALGIGEQFSKYVEPTVAMMRSAAEVCAQMDNSDEELMDYGNQLKRSIFEAYSGILQGFKDSKPELMLPHAGHLFQFIEVVFREKYRDESVTKAAVAVMGDLADALGPNTKILFKDNAFCIQFLGECLQSDDEHLKETANWTQVMIARVVS

SEQ ID NO: 611 - DNA, 2619 bp, Sorghum bicolor
atgtcacttgacgttactcaagttctcttaagtgcgcaatctgctgatggtgcaattaggaagcatgctgaagaaagtcttaagcagttccaggagcagaacctccctggattcttgctttccctctcaagcgagttggccaatgaagagaaacctgaggagagccgaaggttagctggcttgattcttaagaatgcactggatgcaaaggagcagcacaggaagaatgagcttttccagagatggctggcactggatgctggtgccaaggcacaaattaaaggattgttgctgcaaactctcacatctcctgttgcaagtgccagatccactgcttcccaagttattgccaaggttgctggtattgagattccgcagaagcaatggccagagcttataggatcattgcttataaacatacatcaggtccagccaaatgtcaagcaagcaacgcttgagactcttggctatttatgtgaggaagtttctccagatgctgtagaccaagaccaagtcaataaaatacttacagctgttgttcagggtatgaatgcttctgaggcaaactctgatgtgaggcttgcagctacacgggcattgtataatgctttgggctttgctcaggtgaacttctcgaatgacatggagcgtgactatatcatgagagtagtttgtgaagcgacgcagtctccggaggtgaagataaggcaggctgcctttgagtgtttggtggctatatcgtctacttactatgataagctggcaacatacatgcaggatatatttaatataactgcaaaagctgtgaggggagatgaggagtcagtagcactccaggctattgaattctggagttccatatgtgatgaggaaattgacattctggatgagtacagcagtgagtttacagctgattctgatgttccttgctactactttatcaagcaggctcttcctgccttagtgccgatgttgttggaaactctcctcaagcaagaggaagaccaagacttggatgaaggtgcttggaatcttgcaatggctgggggaacttgtttgggcctggtggcaaggactgttggtgatgacattgttcctcttgtaatgcctttcgtggaggagaacataaccaagtctgaatggagacagagagaggctgcaacatatgcctttggctctatcttggagggcccatcagctgataaactggctcctcttgttaatgttgcattgggcttcatgctgtctgcactgacgaaggatcccagtaaccatgtaaaggacacaactgcctggacacttgggagaatctttgagttccttcatggttcagcacttgaaactcctcctatcatcacggctgagaattgtcagcaaatacttactgtgctgcttcacagcatgaaggatgtcccaaatgtggctgaaaaggcatgtggagccctctatttccttgcacaaggctatgtggatgctggatctgcatcgccattatcccctttctttcaagatattgttcagaaccttcttatggtcactcacagggaggatgctggagaatctcggctgcgaacagcagcatatgagaccctaaatgaagttgtcaggtgctccactgaggcagcagcccctattgttatgcagttagtacctgtgatcatggtggagctccatcagacacttgaaactgaaaagctgtcaactgatgagcgggagaagaggagcgaactgcagggcctcctttgtggttgcttgcaggtcattatccaaaagttgggagggatggagtcaactaagtactctttcttgcagtatgctgatcagatgatggatctgtttttgagagtttttgcatgtcgaaatgccacagtgcacgaggaggctatgcttgctattggagcattggcatatgcagctggtccaaactttgcaaagtacatggcacagttttatcagtatttggagatgggacttcagaactttgaggagtatcaggtgtgtgccattaccgtgggcgttgttggtgatctctgcagagcactggaagacaaaattttacccttctgtgatggcatcatgactcagctcctgaaggacctgtccagtaaccagttgcacagatctgtgaagccaccgatattttcttgctttggtgatattgcactggcaattggggaaaactttgagaagtatttgatctatgcgatgcctatgctgcaaagtgctgctgatttgtcggcccataccacagcaactgatgatgagatgctcgactacaccaaccagctaaggaatggaatcttggaagcctactctggtatcctgcaaggattcaagagttcacctaagacacaactactgatgccatatgctccacatattattcagttccttgatgctctgtacaatggaaaggacatggatgatactgtgatgaagactgcaataggtgtcttgggagatctggctgacacattgggtgtccatgctggccctttgatcaatcaatccacctcaagccaggcatttttagaggaatgcttggcatcagatgatccattggtgaaagaatctgccgattgggcaaggatagcaatcagccgtgcagtttcgggttga

SEQ ID NO: 612 - protein, 872 aa, Sorghum bicolor
MSLDVTQVLLSAQSADGAIRKHAEESLKQFQEQNLPGFLLSLSSELANEEKPEESRRLAGLILKNALDAKEQHRKNELFQRWLALDAGAKAQIKGLLLQTLTSPVASARSTASQVIAKVAGIEIPQKQWPELIGSLLINIHQVQPNVKQATLETLGYLCEEVSPDAVDQDQVNKILTAVVQGMNASEANSDVRLAATRALYNALGFAQVNFSNDMERDYIMRVVCEATQSPEVKIRQAAFECLVAISSTYYDKLATYMQDIFNITAKAVRGDEESVALQAIEFWSSICDEEIDILDEYSSEFTADSDVPCYYFIKQALPALVPMLLETLLKQEEDQDLDEGAWNLAMAGGTCLGLVARTVGDDIVPLVMPFVEENITKSEWRQREAATYAFGSILEGPSADKLAPLVNVALGFMLSALTKDPSNHVKDTTAWTLGRIFEFLHGSALETPPIITAENCQQILTVLLHSMKDVPNVAEKACGALYFLAQGYVDAGSASPLSPFFQDIVQNLLMVTHREDAGESRLRTAAYETLNEVVRCSTEAAAPIVMQLVPVIMVELHQTLETEKLSTDEREKRSELQGLLCGCLQVIIQKLGGMESTKYSFLQYADQMMDLFLRVFACRNATVHEEAMLAIGALAYAAGPNFAKYMAQFYQYLEMGLQNFEEYQVCAITVGVVGDLCRALEDKILPFCDGIMTQLLKDLSSNQLHRSVKPPIFSCFGDIALAIGENFEKYLIYAMPMLQSAADLSAHTTATDDEMLDYTNQLRNGILEAYSGILQGFKSSPKTQLLMPYAPHIIQFLDALYNGKDMDDTVMKTAIGVLGDLADTLGVHAGPLINQSTSSQAFLEECLASDDPLVKESADWARIAISRAVSG

SEQ ID NO: 613 - DNA, 507 bp, Arabidopsis thaliana
atggaaggtgtaggatcgagattgagccggacgtcatcgagatacagtggtccggcggcgacggcggtgttcagtggccgtgtaaggaaatggaagaagaagtgggtacgtgtctcaacctcatccgtcggtgttttcagagcatctaaatccaacggtcgtaacaacagcaacaacagtaactcaccacaccatctacttctccataagtggactccacttacctcagcgacggttactgcctccgacgctaatggttccggtgagacagaggagtcgcctaagcgaagattcagatacgctccaattgcgatgcttgagcatagagaaaaagtgatttctaaggattctgaaattgaagagactgaagaattcgacactgaatctccattacctaaagctgttgagctagacatgaacctaacagactcagaccaaactaaggaagcaaaaactggtaatttgaatctgggactgtgtctgaattctgaagggactgaagaatga

SEQ ID NO: 614 - protein, 168 aa, Arabidopsis thaliana; identical to SEQ ID NO: 52

SEQ ID NO: 615 - DNA, 717 bp, Arabidopsis thaliana
atggaaggagttggtgcacggttaggtaggtcctcgacacggtacggaccggcaacggttttcaccggaccggtgaggaagtggaagaagaagtgggtacacgtctctccttcctctaagaaagacaataataatagctcctccggttccgccgctgctgcagcttccgtcgttaacggtggttcgaattctgacggtagtaatggatcgcatttgttgctgtataagtgggcaccattgtctcagaatggtaacggcaatgaagatggtaaaagtgagagtaattctccgagcgaggatacggtggcaacggtggcagaagatcctccacggcggagattcaaatacgttccgatagcagtacttgaggaacagaagaaggaaattacagaaattgaggaagatgataagattgaggaggatgacaagattgatgaggataataaggttgagcaggaagacaaggttgatgaggacaaaactgtagaggagtcgagcgagaagaaagcggaagtggaagtggaggaaaagcctgacatcaatgatgttccgatggaagatattcagcaggttgaagaaaaaatagtacaggatgatgaagaaaaagtagtgcgacaagatttgaacgaaagcactgtggatttaggactgaacttaaatgcaaacgatgctgatgcagaaaacgacccgaaagaggacaagccattagaagaatga

SEQ ID NO: 616 - protein, 238 aa, Arabidopsis thaliana
MEGVGARLGRSSTRYGPATVFTGPVRKWKKKWVHVSPSSKKDNNNSSSGSAAAAASVVNGGSNSDGSNGSHLLLYKWAPLSQNGNGNEDGKSESNSPSEDTVATVAEDPPRRRFKYVPIAVLEEQKKEITEIEEDDKIEEDDKIDEDNKVEQEDKVDEDKTVEESSEKKAEVEVEEKPDINDVPMEDIQQVEEKIVQDDEEKVVRQDLNESTVDLGLNLNANDADAENDPKEDKPLEE

SEQ ID NO: 617 - DNA, 495 bp, Brassica napus
atggaaggcgtagggtcgagattgagccgaacgtcatcgagatacagtggtccggctgcgacggcggttttcagcggccgtgtaaggaagtggaagaagaagtgggtacgtgtctccacgtcaccagtcggcgttttccgagcatctaaatccaacggtcgtagcaacaacaacaacagcagcagcaattctccacaccatctgcttctccataagtggaccccacttccctctgacgctaacggctccggtgagacggaggagccgcctaaacgaagattcaggattgcgatgtttgagcatagggagagagtgggtgctaaggattctgaggttgaagcggaagagactgacgaattcgacaatgattctccattgcctaaagccgttggtctggacatgaacttaactgactccgaccaaactaaggaggcaaaaactcgtcacttgaaactgggactgtgtcttaattctgaagggactgaagaagaatga

SEQ ID NO: 618 - protein, 164 aa, Brassica napus
MEGVGSRLSRTSSRYSGPAATAVFSGRVRKWKKKWVRVSTSPVGVFRASKSNGRSNNNNSSSNSPHHLLLHKWTPLPSDANGSGETEEPPKRRFRIAMFEHRERVGAKDSEVEAEETDEFDNDSPLPKAVGLDMNLTDSDQTKEAKTRHLKLGLCLNSEGTEEE

SEQ ID NO: 619 - DNA, 498 bp, Brassica napus
atggaaggcgtagggtcgagattgagccgaacgtcatcgagatatagtggtccggctgcgacggcggtgttcagcggccgtgtaaggaagtggaagaagaagtgggtacgtgtctccacgtcaccagtcggcgttttccgagcatctaaatccaacggtcgtagcaacaacaacagcagcagcaattccccacaccatctgcttctccataagtggactccactttcctccgaagctaacggttccggtgagacggaggagacgcctaaacgaagattcagatacgctcctattgcgatgtttgagcatagggagagagtgggtgctaagggttctgaggttgaagcggaagagactgacgaattcgacaatgattctccattgcctaaagccgttgggctggacatgaacttaactgactcagaccaaactaaggaggcaaaaactcgtcacttgaaactgggactgtgtcttaattctgaagggactgaagaatga

SEQ ID NO: 620 - protein, 165 aa, Brassica napus
MEGVGSRLSRTSSRYSGPAATAVFSGRVRKWKKKWVRVSTSPVGVFRASKSNGRSNNNSSSNSPHHLLLHKWTPLSSEANGSGETEETPKRRFRYAPIAMFEHRERVGAKGSEVEAEETDEFDNDSPLPKAVGLDMNLTDSDQTKEAKTRHLKLGLCLNSEGTEE

SEQ ID NO: 621 - DNA, 492 bp, Brassica napus
atggaaggcgtagggtcgagactgagccggactacaagatacagtggtccgtccgcgacggcggttttcaacggtcgtgtaaggaagtggaagaagaagtgggtaagtgtctcgacttcatccgtcggcattttccgagcatctaagcccaacggtcgaagcacttctcaacaccatatgcttctccacaagtggaccccactttcctcggcgacggttacagcctccggtgagacggaggagccgcctaagaaaagattcagatacgctccaattgcgatgcttgagaatagagagaaaatggccagtaaggattctgaagctgatgctttaggggaagagagtgataaatttgacactgatgaatctccattgcacaaaggctttgagctggacatgaacatgacagacaccgaccaaactaaggaagcaaaaacaactcgtcactggagactgggactgtgtctgaattctcaagggactgaagaatga

SEQ ID NO: 622 - protein, 163 aa, Brassica napus
MEGVGSRLSRTTRYSGPSATAVFNGRVRKWKKKWVSVSTSSVGIFRASKPNGRSTSQHHMLLHKWTPLSSATVTASGETEEPPKKRFRYAPIAMLENREKMASKDSEADALGEESDKFDTDESPLHKGFELDMNMTDTDQTKEAKTTRHWRLGLCLNSQGTEE

SEQ ID NO: 623 - DNA, 504 bp, Brassica napus
atggaaggcgtagggtcgagattgagccgaacgtcatcgagatacagtggtccggctgcgacggcggttttcagcggccgtgtaaggaagtggaagaagaagtgggtacgtgtctccacgtcaccagtcggcgttttccgagcatctaaatccaacggtcgtagcaacaacaacaacagcagcagcaattctccacaccatctgcttctccataagtggaccccacttccctctgacgctaacggctccggtgagacggaggagccgcctaaacgaagattcagatacgctccaattgcgatgtttgagcatagggagagagtgggtgctaaggattctgaggttgaagcggaagagactgacgaattcgacaatgattctccattgcctaaagccgttggtctggacatgaacttaactgactccgaccaaactaaggaggcaaaaactcgtcacttgaaactgggactgtgtcttaattctgaagggactgaagaagaatga

SEQ ID NO: 624 - protein, 167 aa, Brassica napus
MEGVGSRLSRTSSRYSGPAATAVFSGRVRKWKKKWVRVSTSPVGVFRASKSNGRSNNNNSSSNSPHHLLLHKWTPLPSDANGSGETEEPPKRRFRYAPIAMFEHRERVGAKDSEVEAEETDEFDNDSPLPKAVGLDMNLTDSDQTKEAKTRHLKLGLCLNSEGTEEE

SEQ ID NO: 625 - DNA, 507 bp, Brassica napus
atggaaggcgtagggtcgagattgagccgaacgtcatcgagatatagtggtccggctgcgacggcggtgttcagcggccgtgtaaggaagtggaagaagaagtgggtacgtgtctccacgtcaccagtcggcgttttccgagcatctaaatccaacggtcgtagcaacaacaacaacaacagcagcagcaattccccacaccatctgcttctccataagtggaccccacttccctccgaagctaacggctccggtgagacggaggagccgcctaaacgaagattcagatacgctcctattgcgatgtttgagcatagggagagagtgggtgctaaggattctgaggttgaagcggaagagactgacgaattcgacaatgattctccattgcctaaagccgttgggctggacatgaacttaactgactcagaccaaactaaggaggcaaaaactcgtcacttgaaactgggactgtgtcttaattctgaagggactgaagaagaatga

SEQ ID NO: 626 - protein, 168 aa, Brassica napus
MEGVGSRLSRTSSRYSGPAATAVFSGRVRKWKKKWVRVSTSPVGVFRASKSNGRSNNNNNSSSNSPHHLLLHKWTPLPSEANGSGETEEPPKRRFRYAPIAMFEHRERVGAKDSEVEAEETDEFDNDSPLPKAVGLDMNLTDSDQTKEAKTRHLKLGLCLNSEGTEEE

SEQ ID NO: 627 - DNA, 531 bp, Glycine max
atggaggcggtgggctcgagactcagccgcgccacctcccgttacggcgcccccacggtgttcagcggccccgtcagaaagtggaagaagaagtgggtccacgtcaccccctcttccttacccaacaacaactcacactctcacaccaacaacttcaccaccaccaccaccaacgattcctctcgcctcctcctccgccgttggactccaactaccgccgatgactccgccggagccgtctccgacgatcctccccgaagaaagttccgttacacccctattgctgtgctagaagaacagaaaaagatgaatgttgtgaaggctgaacatgaacccacaattgaggctgaccaattggcatttagacagacaaatgtgactcacgagatgcaggggaaactaaacatgaatgaaatgttggaggaaaccaaggattcaaacattggtaatttggatcttggttcagacttccaaagcaacaccggtgaaaacagccacgacagtgattctcaattggaaaatagtatctag

SEQ ID NO: 628 - protein, 176 aa, Glycine max
MEAVGSRLSRATSRYGAPTVFSGPVRKWKKKWVHVTPSSLPNNNSHSHTNNFTTTTTNDSSRLLLRRWTPTTADDSAGAVSDDPPRRKFRYTPIAVLEEQKKMNVVKAEHEPTIEADQLAFRQTNVTHEMQGKLNMNEMLEETKDSNIGNLDLGSDFQSNTGENSHDSDSQLENSI

SEQ ID NO: 629 - DNA, 609 bp, Glycine max
atggagggagttggggcccggcttgggcggtcctcgacccgctacggaccggccacggtgttcactggaccggtccggaagtggaagaagaaatggatccacgtgtccccttcttctgcttcctctaattccaacgccaataatcatcacaaccacgcttcccatgcctctcatcttctcctctacaagtggacccctctcacccacagccagaacaccgccactactaacaacgctaacgccaaggactcgcctccggagcctcccgaggaaccgcctcgaaggaaattcaaatatgttccggttgctctactagaggagcagaaaaatgagggtgcagaaagtgagggtactgagaaggttgacgaggaatctaaaccaattgatgctgattcaggtgcagcagaagcaactcacaagaatgagactttggatgaaaaacctgacataaatgatgtcccaatggaagaaagtcagtctcagtacaaaaatcaagtggtgcgccaagatctgaatgaaagcacattggacttaagtttgggcttgacatcacatgatgatgaacatgattctgattcaaaaactaatcaaacaagagatggccagtaa

SEQ ID NO: 630 - protein, 202 aa, Glycine max
MEGVGARLGRSSTRYGPATVFTGPVRKWKKKWIHVSPSSASSNSNANNHHNHASHASHLLLYKWTPLTHSQNTATTNNANAKDSPPEPPEEPPRRKFKYVPVALLEEQKNEGAESEGTEKVDEESKPIDADSGAAEATHKNETLDEKPDINDVPMEESQSQYKNQVVRQDLNESTLDLSLGLTSHDDEHDSDSKTNQTRDGQ

SEQ ID NO: 631 - DNA, 606 bp, Glycine max
atggagggagttggggcccggctggggcggtcctcgacccggtacggaccggccacggtgttcactggaccggtgcggaagtggaagaagaaatggatccacgtgtccccctcttctgcttcctctaattccaacgccaataaccacgcttccaatgcctctcatcttctcctctacaagtggacccctctcacccaaagccagaacaccaccaacaacgccaacgctaacggtaatgccaaggacgcgccgccggagccacccgcggaaccgcctcgaagaaaattcaaatatgttccggttgctctactagaggagcaaaaaaatgaggctgcagaaaatgagggtactgagaaggttgacgaggaatctaaaccaattgatgttgattcaggtgcagcagaggcaactcgcaagaatgagactttggatgaaaaacctgacataaatgatgtcccaatggaagaaagtcagtctcagtacaaaaatcaggtggtgcgccaagatctgaatgaaagcaccttggatttaagtttgggcttgacatcacatgatgatgaacatgattctgattcaaaaactaatcaaacgagagatggccagtaa

SEQ ID NO: 632 - protein, 201 aa, Glycine max
MEGVGARLGRSSTRYGPATVFTGPVRKWKKKWIHVSPSSASSNSNANNHASNASHLLLYKWTPLTQSQNTTNNANANGNAKDAPPEPPAEPPRRKFKYVPVALLEEQKNEAAENEGTEKVDEESKPIDVDSGAAEATRKNETLDEKPDINDVPMEESQSQYKNQVVRQDLNESTLDLSLGLTSHDDEHDSDSKTNQTRDGQ

SEQ ID NO: 633 - DNA, 528 bp, Glycine max
atggaggcggtgggttcgagactcagccgcgcctcctcccgctacggcgcccccaccgtgttcagcggccccgtcagaaagtggaagaagaagtgggtccacgtcaccccctcttccttacccaacaacagctctcactctcacactaacaactccaccaccaccagcagcgcttcctctcgcctcctccttcgccgttggactcccgccaccgtcgacgacgccgccggagccgtctccgacgagcctccccgaagaaagttccgttacaccccggttgttgtcctagaagaacagaaaaagatgaatgttgtgaaggctgaacatgaacccacaattgagactgaccaattggctgctaggaagacaaatgtgactcatgagatgcagggaaaactgaacatgaatgaaatgttggaggaaaccaaggattcaaacattggtaatttagatcttggttcagacttccaaagcaacaccggtggaaacagccagaacagtgattctcaattggaaaatagtatgtaa

SEQ ID NO: 634 - protein, 175 aa, Glycine max
MEAVGSRLSRASSRYGAPTVFSGPVRKWKKKWVHVTPSSLPNNSSHSHTNNSTTTSSASSRLLLRRWTPATVDDAAGAVSDEPPRRKFRYTPVVVLEEQKKMNVVKAEHEPTIETDQLAARKTNVTHEMQGKLNMNEMLEETKDSNIGNLDLGSDFQSNTGGNSQNSDSQLENSM

SEQ ID NO: 635 - DNA, 450 bp, Hordeum vulgare
atggacaccgtgggcgcccggctgagccgctcctccacgcgctatggccccgtcggcagcagcaacgcctccttcagcgggcccgtcaggaagtggcgcaaggcgtgggcccctctcgccggcggcggcgcggggtccgcctccgccggtatgggtcccattgggtgccccaggggtaacaagggggtgctgctcaagtgggcgccagtgagcggcgctggcgacggcaacggcaaggaggtcgccgcgacggccacccgacggcgctacgttccggtttcgggtgtgccacagaaccctaccagaaaaagcggcagcaccgagctgaacctgaaccttggtttggaggatccggatgatgacagggacgctgatttgagcccagacgaacaagaggacacgggcagcaccccgcgttccgaaaaccgactgaagaggaaagtgttttaa

SEQ ID NO: 636 - protein, 149 aa, Hordeum vulgare
MDTVGARLSRSSTRYGPVGSSNASFSGPVRKWRKAWAPLAGGGAGSASAGMGPIGCPRGNKGVLLKWAPVSGAGDGNGKEVAATATRRRYVPVSGVPQNPTRKSGSTELNLNLGLEDPDDDRDADLSPDEQEDTGSTPRSENRLKRKVF

SEQ ID NO: 637 - DNA, 432 bp, Hordeum vulgare
atggagggtgttggcgcgcgattagggcgttcgtcggcccgttacggccccgcgatgacgttcaccgggcccgttaggaagtggcggaaggaatgggtccccatctccgccgccacggccacggcctcctccgccgggactggatctcgcggaaataacctcatcctgttcaagtggaccccgtttaacggctccaacgaaggagatgaggagcagacggcaccggcgaagacggccacgagaaggcggcggtacgtgccggtttctgtagttcaagatcaaaggcaagaatctgccaaatctgatgatgagaacaaggctaatgatggagaaccttcatctacggaaacagagcagtctattgggaaaactaatatcgatgatatacttatggatgaatcccaggtaaaatggacttatttagctgtataa

SEQ ID NO: 638 - protein, 143 aa, Hordeum vulgare
MEGVGARLGRSSARYGPAMTFTGPVRKWRKEWVPISAATATASSAGTGSRGNNLILFKWTPFNGSNEGDEEQTAPAKTATRRRRYVPVSVVQDQRQESAKSDDENKANDGEPSSTETEQSIGKTNIDDILMDESQVKWTYLAV

SEQ ID NO: 639 - DNA, 627 bp, Medicago truncatula
atggaaggagttggggcccgactggggcggtcctcgacccgttacggaccggcaacggttttcaccggaccggttagaaaatggaagaagaaatgggttcatgttttaccttcatcttcttcatctaattccaacaacaacaacgcgaatcaaaatcacgctaacggtagtaacggtaataacggttctcatcttcttctttttaagtggactcctattactcaaagccagaacaacgccaacggtaatggaaatggaagtgttaaggatgcggcggtggagccggtggaagagccaccgcggcgcaagtttaaatatgttccggttgctgtactagaggagcagaaaaacgaggctaccgaagatgaggttgccgaaaaggttgaagatgaatctaatccaatagaggctgattcaagtgcagcagaaccaaccagcaagaatgagactttggatgaaaaacctgatataaatgatgtcccaatggaagaaagcgagcctcaggacaaaaatcaggtagtacgccaagatctcaatgaaagtttggatttgagtttgggtttgacatcacatgatgaagatcaagattctgattcaaaaactaatcaacctacagatggtcagtaa

SEQ ID NO: 640 - protein, 208 aa, Medicago truncatula
MEGVGARLGRSSTRYGPATVFTGPVRKWKKKWVHVLPSSSSSNSNNNNANQNHANGSNGNNGSHLLLFKWTPITQSQNNANGNGNGSVKDAAVEPVEEPPRRKFKYVPVAVLEEQKNEATEDEVAEKVEDESNPIEADSSAAEPTSKNETLDEKPDINDVPMEESEPQDKNQVVRQDLNESLDLSLGLTSHDEDQDSDSKTNQPTDGQ

SEQ ID NO: 641 - DNA, 312 bp, Medicago truncatula
atggagacagtgggttctacgaggttgggtagagcatcttcacgctacggtgcacctgcagtgttcaatggtcctgttcgtaaatgggagaagaaatgggttcatgtttcaccttcttcgtttaacaacaacaagaaaaataataaggataatagtaacgagaaatctcgtttacttcttcgtcgttggactccggttgcgaattcttcttctgctgaggatgtttctgatgagccacctagaaggaagtttcgttatactcctattgctgcgctagaagaacagaaaaaggggggctgtggaaaaggttga

SEQ ID NO: 642 - protein, 103 aa, Medicago truncatula
METVGSTRLGRASSRYGAPAVFNGPVRKWEKKWVHVSPSSFNNNKKNNKDNSNEKSRLLLRRWTPVANSSSAEDVSDEPPRRKFRYTPIAALEEQKKGGCGKG

SEQ ID NO: 643 - DNA, 648 bp, Oryza sativa
atggagggcgtgggcgcgcggctcgggcgcacctcggcccgctacggcaccacgacgacgttcacggggcccgtcaggaagtggcgcaaggactgggtgcccgtcgccgccgccgccgccgcggcggcggcggcggcgtcggccgcctcctccacggcgggggccggatcccgcgggaacaatctcgtgctcttcaagtggaccccgatgaacggcgccaacggcaacgggggcggaggagacggagaccaggcggcggcggcggccgccgccgcggaggaggagaaggccacgaaacggcggcggtacgtgccggtttctgtagttgaagatgaaaggcaagaatctggaaaatctgacgatgaaaataaggcaaatgatggagaaccatcatccgccgaaactgagccatctaatggaaaaactaatattaatgatacaccaatggatgaatctcaggcatcagatgaggcccgatattctggcaaaaatggcggtggaaccgacctaaatttaaacttgggtctgaaggaccctgacggagacaatgatattgatactgaagaacaagatgctgaaaacaacacacacacagaaaataggctgaagaggaaatctgtagctcctgaccttgagatgagaatgtaa

SEQ ID NO: 644 - protein, 215 aa, Oryza sativa
MEGVGARLGRTSARYGTTTTFTGPVRKWRKDWVPVAAAAAAAAAAASAASSTAGAGSRGNNLVLFKWTPMNGANGNGGGGDGDQAAAAAAAAEEEKATKRRRYVPVSVVEDERQESGKSDDENKANDGEPSSAETEPSNGKTNINDTPMDESQASDEARYSGKNGGGTDLNLNLGLKDPDGDNDIDTEEQDAENNTHTENRLKRKSVAPDLEMRM

SEQ ID NO: 645 - DNA, 315 bp, Oryza sativa
atggagggcgtgggcgcgcggctcgggcgcacctcggcccgctacggcaccacgacgacgttcacggggcccgtcaggaagtggcgcaaggactgggtgcccgtcgccgccgccgccgccgcggcggcggcggcggcgtcggccgcctcctccacggcgggggccggatcccgcgggaacaatctcgtgctcttcaagtggaccccgatgaacggcgccaacggcaacgggggcggaggagacggagaccaggcggcggcggcggccgccgccgcggaggaggagaaggccacgaaacggcggcggtttctgtag

SEQ ID NO: 646 - protein, 104 aa, Oryza sativa
MEGVGARLGRTSARYGTTTTFTGPVRKWRKDWVPVAAAAAAAAAAASAASSTAGAGSRGNNLVLFKWTPMNGANGNGGGGDGDQAAAAAAAAEEEKATKRRRFL

SEQ ID NO: 647 - DNA, 468 bp, Oryza sativa
atggacaccgtgggcgcccgcctgagccgctcgtcgacgcggtacggccccgtcgggaacaccgcctcctccttcagcgggcccgtcaggaagtggcgcaaggcctgggtccccatcgccgccggcggggcggggtacgccgggatgatgggccccatgggtgtctccagggggaacaaggtggtgctgttcaggtgggcgccggtgaacggcggcgcggccgggggtggcggtggcagcggcgacggcgacgagtcggcagcggtggcggccaccaggcggcgcttcgttccggcttcaggcgtggcacaaaattctaccaagaagagcggcagcaccgagctgaatttgaaccttgggttggaagatccagatgacgacagcgatgctgatctgagcgcagaagagcaacgtgacagtggaagtaaccaacgctcagacaacagactgaagagaaaagccttttaa

SEQ ID NO: 648 - protein, 155 aa, Oryza sativa
MDTVGARLSRSSTRYGPVGNTASSFSGPVRKWRKAWVPIAAGGAGYAGMMGPMGVSRGNKVVLFRWAPVNGGAAGGGGGSGDGDESAAVAATRRRFVPASGVAQNSTKKSGSTELNLNLGLEDPDDDSDADLSAEEQRDSGSNQRSDNRLKRKAF

SEQ ID NO: 649 - DNA, 1074 bp, Physcomitrella patens
atgatagcgaaagaaagaaagaaaagtgaaggaaagaaagaaaagcaaaagaaagaaaggaaagggaggaaaagagagaaaagcgagggaaagaaaggaaagggagggaaagagagaaaagcgagggaaagaaagcgagggaagaaaacgaaggaaacgaaggtggtgttgggaaaggcacgaccaagcagagctcgcggagcatcgagggagggagggagagcgagtgagggagctcgatcgatcacacacagacacacagcggagcaccgcacggtggccttacctcattcagttcgtgtcgatccctgcactctctgccatgccatgcgttctcattccctcgtgatcgcctccacgcttcccctcaccctctcgccattcccatttttgcactgtctcgcgcccgctcaggatcactgcgcattgcatcgtttggttcctggagggcgatgtttagggttctgggaggtcaagatggaagggggtttggggagtacgcgaatgggcagtcggtcgtccactcgccatggtccggcatcggtattccaaggtcgagtgcggcgatggaagaagtcttgggctcccgtggcgccttcgtccactccttccgctgcagcttgtcgtgttcttctttacaaatggtcgcctatcacggtacccgctgctaacgggacgaaagagtccactccggaggagccaccaccagcgaaacccttgcgatatttgcctgtttcagtaatcctgcaacagaagaaggaagaagctcagaaagctgaagaagaagctgaaactctgtcaagattagaacaagaggcagtggctgccacaagtccagcacaggagaaggatggagctgaggcggctggtacccaacaggatacaagcatgggtgattctcaaccagaacaagctggtgatccaataaccaaagttgatgaaggtgcaaatgccactgaggctggagaacaagaggttcaagatgtcacggaagcaaatcaagcggaacaggaacaggacgagagcactgcacaagaaccagaggctacatctatggatgtgactcaaggttga

SEQ ID NO: 650 - protein, 357 aa, Physcomitrella patens
MIAKERKKSEGKKEKQKKERKGRKREKSEGKKGKGGKERKARERKRGKKTKETKVVLGKARPSRARGASREGGRASEGARSITHRHTAEHRTVALPHSVRVDPCTLCHAMRSHSLVIASTLPLTLSPFPFLHCLAPAQDHCALHRLVPGGRCLGFWEVKMEGGLGSTRMGSRSSTRHGPASVFQGRVRRWKKSWAPVAPSSTPSAAACRVLLYKWSPITVPAANGTKESTPEEPPPAKPLRYLPVSVILQQKKEEAQKAEEEAETLSRLEQEAVAATSPAQEKDGAEAAGTQQDTSMGDSQPEQAGDPITKVDEGANATEAGEQEVQDVTEANQAEQEQDESTAQEPEATSMDVTQG

SEQ ID NO: 651 - DNA, 399 bp, Populus trichocarpa
atggaaggagtcggggcacggctggggaggtcttccactcgctacgggccggccacggtgttcagtgggccggtgaggaagtggaagaagagatgggtccatgtcaacccatcatccaaccacaacagctttcactctcatcaccataacgctactactaatgctgctgctgcttcttcttcagccgctaatcattcgagctcttctaacggtaataacggctcccatctattgctttacaagtggaccgctttgtctcaatccaacggttcctcatctactactaaccacttcaacggtaataatattaatactactaacgaaattgctaatctctccaatggcgacgtcaccgaggagcctcccaggcgtaaattcaaatacatcccggttgcctga

SEQ ID NO: 652 - protein, 132 aa, Populus trichocarpa
MEGVGARLGRSSTRYGPATVFSGPVRKWKKRWVHVNPSSNHNSFHSHHHNATTNAAAASSSAANHSSSSNGNNGSHLLLYKWTALSQSNGSSSTTNHFNGNNINTTNEIANLSNGDVTEEPPRRKFKYIPVA

SEQ ID NO: 653 - DNA, 717 bp, Populus trichocarpa
atgtcggtccttaagggctttgcctcaactcccagcgagcagtcctcacgtatcctctgctctgctgaattatatcttttacccaaaaaaccggcgattcctgaaaaacaaagccgagattttggggtgagaaaaatggagggagtgggatctcggttgggccggtcttcgtctcggtacggcctatcagcgacggccgctgttcttaatggccccgtcaggaagtggaagaggaaatgggtccacgtgtccccttctcccaccctcaattaccgcaacaacagccactccaacggccataacaacaacaacaacaacaacaacaacggctctcgcctcctcctctgtcggtggactccactacccccctctggggccaccgccgctacctcctcctccgaggatccacctaaacgcaaattccgttacaccccaattgctgtactggaggaacgtagcaaggtagaaaagaaggttgaacaagaagttgagaagcagttggtagggtggctaacttctaaggatgatagacaaaatattggagatggtctcaagagtgaaattcaggattcaaacatgagccatttggatttggatttggatttgcgcttaaaaggcctcaacaatgatcttgactctgttggccaaagcgaagaggatcaagtgaagaaagcaagctcaggtgggtttggacgagtggttgacccaagaaactga

SEQ ID NO: 654 - protein, 238 aa, Populus trichocarpa
MSVLKGFASTPSEQSSRILCSAELYLLPKKPAIPEKQSRDFGVRKMEGVGSRLGRSSSRYGLSATAAVLNGPVRKWKRKWVHVSPSPTLNYRNNSHSNGHNNNNNNNNNGSRLLLCRWTPLPPSGATAATSSSEDPPKRKFRYTPIAVLEERSKVEKKVEQEVEKQLVGWLTSKDDRQNIGDGLKSEIQDSNMSHLDLDLDLRLKGLNNDLDSVGQSEEDQVKKASSGGFGRVVDPRN

SEQ ID NO: 655 - DNA, 639 bp, Populus trichocarpa
atggaaggagtcggggcgcggctggggagatcttcgactcggtacgggccggccacggtgttcagcgggccggttaggaagtggaagaagagatgggtccacgtaacccctccgtcatcttcatcaaaccataacaacactcattcgcatcaccataacgctattagtaatggcactgccgctgctaacaattcaagctcttctaacggtaataacggctcccatctcttgctttataagtggacccctttgtctcaatccaacggttcttcttctccttctcctgccactaacaacaacggtaacagcaacaatgatgataataaaaacaatgctaatctctccaacggcgacgcccccgatgagcctcccaggcgtaaattcaaatacattccggttgatctgctagagaaacagaagaaagaggctgaagaacaagaggcctttgaaaaggttgatgatgaatctaaactgaatgatactgaccctaaagcagaactagtttccaagagtgacagcgctgaagaaaaacctgacataaatgatatacccatggaagaaaatgaggatgataatcaagtggtacgacaagatctgaatgaaagcactttggatttgagtttaggcttggtctcttga

SEQ ID NO: 656 - protein, 212 aa, Populus trichocarpa
MEGVGARLGRSSTRYGPATVFSGPVRKWKKRWVHVTPPSSSSNHNNTHSHHHNAISNGTAAANNSSSSNGNNGSHLLLYKWTPLSQSNGSSSPSPATNNNGNSNNDDNKNNANLSNGDAPDEPPRRKFKYIPVDLLEKQKKEAEEQEAFEKVDDESKLNDTDPKAELVSKSDSAEEKPDINDIPMEENEDDNQVVRQDLNESTLDLSLGLVS

SEQ ID NO: 657 - DNA, 366 bp, Triticum aestivum
atggagggcgttggcgcgcggttagggcgctcgtcggcccgttacggccccgcgatgacgttcacggggcccgttaggaagtggcggaaggaatgggtcaccatctccgccgccacggccacggccacctccgccgcggcctcctccaccgggactggatctcgtggaaataacctcatcctgttcaagtggaccccgctgaacggcgccaacgaaggagatgaggagcagacggcaccggcgaagacggccacgagaaggcggcggtacgtgccggtttctgtagttcaagatcaaaggcaagaatctgccaaatctgatgatgagaacaaggctaatgatggagaacttcatctacgaaactga

SEQ ID NO: 658 - protein, 121 aa, Triticum aestivum
MEGVGARLGRSSARYGPAMTFTGPVRKWRKEWVTISAATATATSAAASSTGTGSRGNNLILFKWTPLNGANEGDEEQTAPAKTATRRRRYVPVSVVQDQRQESAKSDDENKANDGELHLRN

SEQ ID NO: 659 - DNA, 600 bp, Triticum aestivum
atggagggcgttggcgcgcggttagggcgctcgtcggcccgttacggccccgcgatgacgttcacggggcccgttaggaagtggcggaaggaatgggtcaccatctccgccgccacggccacggccacctccgccgcggcctcctccaccgggactggatctcgtggaaataacctcatcctgttcaagtggaccccgctgaacggcgccaacgaaggagatgaggagcagacggcaccggcgaagacggccacgagaaggcggcggtacgtgccggtttctgtagttcaagatcaaaggcaagaatctgccaaatctgatgatgagaacaaggctaatgatggagaaccttcatctacggaaactgagcagtctattgggaaaactaatatggatgatatacttatggatgagtcccaggcatcagatgaggttcgagattctggaaatttcgttggtggaaccgatctaaatctgaacttaggtccgaaagaccccgacggtgaagatgaaggtgatacaggtaagcaacacgaggctcgaacagaacacagattgaagaggaaatctgttacccctgacctcgagatgagaatgtaa

SEQ ID NO: 660 - protein, 199 aa, Triticum aestivum
MEGVGARLGRSSARYGPAMTFTGPVRKWRKEWVTISAATATATSAAASSTGTGSRGNNLILFKWTPLNGANEGDEEQTAPAKTATRRRRYVPVSVVQDQRQESAKSDDENKANDGEPSSTETEQSIGKTNMDDILMDESQASDEVRDSGNFVGGTDLNLNLGPKDPDGEDEGDTGKQHEARTEHRLKRKSVTPDLEMRM

SEQ ID NO: 661 - DNA, 516 bp, Zea mays
atggagggtgtgggcgcgcggctagggcgcacttcggcgcgctacgggccggcgacgacgttcacgggccatgtcaggaagtggcgcaaggagtgggtaccagtggtcgccgccgccgccgccgccgccgccaacgccaacaccagcgccaacggtggcacgacgtcctccacggggatgggatctggcggaggatcccgcgggaataatcttctcctgtttaagtggaccccggtgaacggggctaacgggggaggaggggatggggagcagcagcagcaggctgagacggccacgagacgccggcggtatgtgccggtttctttaatggaagagcaaaggcaagaatctaccaaatctgatgatgagaacaaagctaatgatggagatccatcttcgaatgaaactgagccatcaaatggaaagactgatatcaatgatacacctatggatgaatctcaggcaacagatgaggatggtcgaaattctggaaaaacggccgggggaacaaactaa

SEQ ID NO: 662 - protein, 171 aa, Zea mays
MEGVGARLGRTSARYGPATTFTGHVRKWRKEWVPVVAAAAAAAANANTSANGGTTSSTGMGSGGGSRGNNLLLFKWTPVNGANGGGGDGEQQQQAETATRRRRYVPVSLMEEQRQESTKSDDENKANDGDPSSNETEPSNGKTDINDTPMDESQATDEDGRNSGKTAGGTN

SEQ ID NO: 663 - DNA, 657 bp, Zea mays
atggagggtgtgggcgcgcggctagggcgcacttcggcgcgctacgggccggcgacgacgttcacgggccatgtcaggaagtggcgcaaggagtgggtaccagtggtcgccgccgccgccgccgccgccgccaacgccaacaccagcgccaacggtggcacgacgtcctccacggggatgggatctggcggaggatcccgcgggaataatcttctcctgtttaagtggaccccggtgaacggggctaacgggggaggaggggatggggagcagcagcagcaggctgagacggccacgagacgccggcggtatgtgccggtttctttaatggaagagcaaaggcaagaatctaccaaatctgatgatgagaacaaggctaatgatggagatccatcttcgaatgaaactgagccatcaaatggaaagactgatatcaatgatacacctatggatgaatctcaggcaacagatgaggatggtcgagattctggtaaaaacggcggtggaacagacctaaatttgaatttaggtttgaaagacccggatggtgataatgaagttgagacatcagagaaacatgtagcggcaaacaatccgcagacagagaatagatccaagaggaaatccgtaacccctgaccttgagatgacaatgtaa

SEQ ID NO: 664 - protein, 218 aa, Zea mays
MEGVGARLGRTSARYGPATTFTGHVRKWRKEWVPVVAAAAAAAANANTSANGGTTSSTGMGSGGGSRGNNLLLFKWTPVNGANGGGGDGEQQQQAETATRRRRYVPVSLMEEQRQESTKSDDENKANDGDPSSNETEPSNGKTDINDTPMDESQATDEDGRDSGKNGGGTDLNLNLGLKDPDGDNEVETSEKHVAANNPQTENRSKRKSVTPDLEMTM

SEQ ID NO: 665 - DNA, 2194 bp, Oryza sativa
aatccgaaaagtttctgcaccgttttcaccccctaactaacaatatagggaacgtgtgctaaatataaaatgagaccttatatatgtagcgctgataactagaactatgcaagaaaaactcatccacctactttagtggcaatcgggctaaataaaaaagagtcgctacactagtttcgttttccttagtaattaagtgggaaaatgaaatcattattgcttagaatatacgttcacatctctgtcatgaagttaaattattcgaggtagccataattgtcatcaaactcttcttgaataaaaaaatctttctagctgaactcaatgggtaaagagagagattttttttaaaaaaatagaatgaagatattctgaacgtattggcaaagatttaaacatataattatataattttatagtttgtgcattcgtcatatcgcacatcattaaggacatgtcttactccatcccaatttttatttagtaattaaagacaattgacttatttttattatttatcttttttcgattagatgcaaggtacttacgcacacactttgtgctcatgtgcatgtgtgagtgcacctcctcaatacacgttcaactagcaacacatctctaatatcactcgcctatttaatacatttaggtagcaatatctgaattcaagcactccaccatcaccagaccacttttaataatatctaaaatacaaaaaataattttacagaatagcatgaaaagtatgaaacgaactatttaggtttttcacatacaaaaaaaaaaagaattttgctcgtgcgcgagcgccaatctcccatattgggcacacaggcaacaacagagtggctgcccacagaacaacccacaaaaaacgatgatctaacggaggacagcaagtccgcaacaaccttttaacagcaggctttgcggccaggagagaggaggagaggcaaagaaaaccaagcatcctccttctcccatctataaattcctccccccttttcccctctctatataggaggcatccaagccaagaagagggagagcaccaaggacacgcgactagcagaagccgagcgaccgccttctcgatccatatcttccggtcgagttcttggtcgatctcttccctcctccacctcctcctcacagggtatgtgcctcccttcggttgttcttggatttattgttctaggttgtgtagtacgggcgttgatgttaggaaaggggatctgtatctgtgatgattcctgttcttggatttgggatagaggggttcttgatgttgcatgttatcggttcggtttgattagtagtatggttttcaatcgtctggagagctctatggaaatgaaatggtttagggatcggaatcttgcgattttgtgagtaccttttgtttgaggtaaaatcagagcaccggtgattttgcttggtgtaataaagtacggttgtttggtcctcgattctggtagtgatgcttctcgatttgacgaagctatcctttgtttattccctattgaacaaaaataatccaactttgaagacggtcccgttgatgagattgaatgattgattcttaagcctgtccaaaatttcgcagctggcttgtttagatacagtagtccccatcacgaaattcatggaaacagttataatcctcaggaacaggggattccctgttcttccgatttgctttagtcccagaattttttttcccaaatatcttaaaaagtcactttctggttcagttcaatgaattgattgctacaaataatgcttttatagcgttatcctagctgtagttcagttaataggtaatacccctatagtttagtcaggagaagaacttatccgatttctgatctccatttttaattatatgaaatgaactgtagcataagcagtattcatttggattattttttttattagctctcaccccttcattattctgagctgaaagtctggcatgaactgtcctcaattttgttttcaaattcacatcgattatctatgcattatcctcttgtatctacctgtagaagtttctttttggttattccttgactgcttgattacagaaagaaatttatgaagctgtaatcgggatagttatactgcttgttcttatgattcatttcctttgtgcagttcttggtgtagcttgccactttcaccagcaaagttc

SEQ ID NO: 666 - DNA, 1130 bp, Oryza sativa
catgcggctaatgtagatgctcactgcgctagtagtaaggtactccagtacattatggaatatacaaagctgtaatactcgtatcagcaagagagaggcacacaagttgtagcagtagcacaggattagaaaaacgggacgacaaatagtaatggaaaaacaaaaaaaaacaaggaaacacatggcaatataaatggagaaatcacaagaggaacagaatccgggcaatacgctgcgaaagtactcgtacgtaaaaaaaagaggcgcattcatgtgtggacagcgtgcagcagaagcagggatttgaaaccactcaaatccaccactgcaaaccttcaaacgaggccatggtttgaagcatagaaagcacaggtaagaagcacaacgccctcgctctccaccctcccacccaatcgcgacgcacctcgcggatcggtgacgtggcctcgccccccaaaaatatcccgcggcgtgaagctgacaccccgggcccacccacctgtcacgttggcacatgttggttatggttcccggccgcaccaaaatatcaacgcggcgcggcccaaaatttccaaaatcccgcccaagcccctggcgcgtgccgctcttccacccaggtccctctcgtaatccataatggcgtgtgtaccctcggctggttgtacgtgggcgggttaccctgggggtgtgggtggatgacgggtgggcccggaggaggtccggccccgcgcgtcatcgcggggcggggtgtagcgggtgcgaaaaggaggcgatcggtacgaaaattcaaattaggaggtggggggcggggcccttggagaataagcggaatcgcagatatgcccctgacttggcttggctcctcttcttcttatcccttgtcctcgcaaccccgcttccttctctcctctcctcttctcttctcttctctggtggtgtgggtgtgtccctgtctcccctctccttcctcctctcctttcccctcctctcttcccccctctcacaagagagagagcgccagactctccccaggtgaggtgagaccagtctttttgctcgattcgacgcgcctttcacgccgcctcgcgcggatctgaccgcttccctcggccttctcgcaggattcagcc

SEQ ID NO: 667 - DNA, 325 bp, Sugarcane bacilliform virus
gccatttaaatccagatctccaagacgtaagcaatgacgattgaggaggcattgacgtcagggatgaccgcagcggagagtactgggcccattcagtggatgctccactgagttgtattattgtgtgcttttcggacaagtgtgctgtccactttcttttggcacctgtgccactttattccttgtctgccacgatgcctttgcttagcttgtaagcaaggatcgcagtgcgtgtgtgacaccaccccccttccgacgctctgcctatataaggcaccgtctgtaagctcttacgatcatcggtagttcaccacatttaaatcgc

SEQ ID NO: 668 - DNA, 911 bp, Sugarcane bacilliform virus
agatctccaagacgtaagcaatgacgattgaggaggcattgacgtcagggatgaccgcagcggagagtactgggcccattcagtggatgctccactgagttgtattattgtgtgcttttcggacaagtgtgctgtccactttcttttggcacctgtgccactttattccttgtctgccacgatgcctttgcttagcttgtaagcaaggatcgcagtgcgtgtgtgacaccaccccccttccgacgctctgcctatataaggcaccgtctgtaagctcttacgatcatcggtagttcaccagtcgacaccgggccttcacctgcggagggtaagatccgatcaccatcttctgaatttctgttcttgatctgtcatgtataataactgtctagtcttggtgttggtgagatggaaattcggtggatctcggaagggatattgttcgtttgctggggttttttttgtgtgttgtgatccgtagagaatttgtgtttatccatgttgttgatcttggtatgtattcatgacatattgacatgcatgtgttgtatgtgtcatatgtgtgcctctccttgggatttgttttggataatagaacatgttatggactcaatagtctgtgaacaaatctttttttagatggtggccaaatctgatgatgatctttcttgagaggaaaaagttcatgatagaaaaatcttttttgagatggtggcttaatgtgatgatgatctttcttgagaggaaaaaaaagattcattataggagattttgatttagctcctttccaccgatattaaatgaggagcatgcatgctgattgctgataaggatctgatttttttatcccctcttctttgaacagacaagaaataggctctgaatttctgattgattatttgtacatgcag

SEQ ID NO: 669 - DNA, 1994 bp, Zea mays
tgcagtgcagcgtgacccggtcgtgcccctctctagagataatgagcattgcatgtctaagttataaaaaattaccacatattttttttgtcacacttgtttgaagtgcagtttatctatctttatacatatatttaaactttactctacgaataatataatctatagtactacaataatatcagtgttttagagaatcatataaatgaacagttagacatggtctaaaggacaattgagtattttgacaacaggactctacagttttatctttttagtgtgcatgtgttctcctttttttttgcaaatagcttcacctatataatacttcatccattttattagtacatccatttagggtttagggttaatggtttttatagactaatttttttagtacatctattttattctattttagcctctaaattaagaaaactaaaactctattttagtttttttatttaatagtttagatataaaatagaataaaataaagtgactaaaaattaaacaaataccctttaagaaattaaaaaaactaaggaaacatttttcttgtttcgagtagataatgccagcctgttaaacgccgtcgacgagtctaacggacaccaaccagcgaaccagcagcgtcgcgtcgggccaagcgaagcagacggcacggcatctctgtcgctgcctctggacccctctcgagagttccgctccaccgttggacttgctccgctgtcggcatccagaaattgcgtggcggagcggcagacgtgagccggcacggcaggcggcctcctcctcctctcacggcaccggcagctacgggggattcctttcccaccgctccttcgctttcccttcctcgcccgccgtaataaatagacaccccctccacaccctctttccccaacctcgtgttgttcggagcgcacacacacacaaccagatctcccccaaatccacccgtcggcacctccgcttcaaggtacgccgctcgtcctccccccccccccccctctctaccttctctagatcggcgttccggtccatggttagggcccggtagttctacttctgttcatgtttgtgttagatccgtgtttgtgttagatccgtgctgctagcgttcgtacacggatgcgacctgtacgtcagacacgttctgattgctaacttgccagtgtttctctttggggaatcctgggatggctctagccgttccgcagacgggatcgatttcatgattttttttgtttcgttgcatagggtttggtttgcccttttcctttatttcaatatatgccgtgcacttgtttgtcgggtcatcttttcatgcttttttttgtcttggttgtgatgatgtggtctggttgggcggtcgttctagatcggagtagaattctgtttcaaactacctggtggatttattaattttggatctgtatgtgtgtgccatacatattcatagttacgaattgaagatgatggatggaaatatcgatctaggataggtatacatgttgatgcgggttttactgatgcatatacagagatgctttttgttcgcttggttgtgatgatgtggtgtggttgggcggtcgttcattcgttctagatcggagtagaatactgtttcaaactacctggtgtatttattaattttggaactgtatgtgtgtgtcatacatcttcatagttacgagtttaagatggatggaaatatcgatctaggataggtatacatgttgatgtgggttttactgatgcatatacatgatggcatatgcagcatctattcatatgctctaaccttgagtacctatctattataataaacaagtatgttttataattatttcgatcttgatatacttggatgatggcatatgcagcagctatatgtggatttttttagccctgccttcatacgctatttatttgcttggtactgtttcttttgtcgatgctcaccctgttgtttggtgttacttctgcag

SEQ ID NO: 670 - protein, 46 aa, Artificial sequence
  SNH domain
IQQYLDENKSLILKIVESQNSGKLSECAENQARLQRNLMYLAAIAD
